(19) United States
(12) Patent Application Publication
(10) Pub. No.: US 2026/0199521 A1
(43) Pub. Date: Jul. 16, 2026

(54) GENE EDITING FOR INTERVERTEBRAL, INTRA- AND PERIDISCAL THERAPY AND ASSOCIATED SPINAL DISORDERS

(71) Applicant: ORTHOBIO THERAPEUTICS, INC., Vail, CO (US)

(72) Inventors: Peter J. MILLETT, Edwards, CO (US); Matthew J. ALLEN, Swaffham Bulbeck, Cambs (GB); George GENTSCH, Cambridge (GB)

(21) Appl. No.: 18/855,980

(22) PCT Filed: Apr. 12, 2023
(86) PCT No.: PCT/US2023/065684

§ 371 Date: Oct. 10, 2024

(51) Int. Cl. A61K 48/00; A61K 38/46; C12N 9/22; C12N 15/11; C12N 15/86

(52) U.S. Cl. CPC A61K 48/005; A61K 38/465; C12N 9/226; C12N 15/11; C12N 15/86; C12N 2310/20; C12N 2750/14143

(57) ABSTRACT

The present disclosure provides compositions and methods for treating and preventing localized nociception, inflammation, or morphological changes associated with joint disease or illness, back or spine conditions or disorders, and musculoskeletal diseases or dysfunction.

### CROSS REFERENCE TO RELATED APPLICATIONS

[0001] This application claims priority to U.S. Provisional Patent Application Nos. 63/362,858, filed Apr. 12, 2022, 63/334,476, filed Apr. 25, 2022, 63/342,471, filed May 16, 2022, and 63/495,461, filed Apr. 11, 2023, the contents of which are hereby incorporated by reference herein, in their entireties, for all purposes.

### BACKGROUND OF THE DISCLOSURE

[0002] Spinal conditions or disorders, including low back pain, or neck pain associated with intervertebral disc degeneration (IDD) (also known as degenerative disc disease (DDD)), disc herniation, spinal stenosis, spondylosis, spondylolisthesis, infection (discospondylitis), and neuropathies such as discogenic pain, radiculopathy, sciatica, or post-herpetic neuralgia.

[0003] Low back pain (LBP) is a major cause of morbidity and disability worldwide for which few long-term options for amelioration currently exist. Andersson, G. B. (1999). Lancet 354, 581-585. Low back pain (LBP) is the single leading cause of disability worldwide having a global lifetime prevalence of 38.9%. In a recent survey of 126 countries, LBP was identified as the leading cause of worldwide productivity loss and of years lived with disability. Wu, A. et al. (2020). Annals of Translational Medicine 8, 299. Presently available treatments include surgical or less invasive options that often fail to offer long-term palliation. Ju, D. G., et al. (2022). Global Spine Journal 12(5), 756-764. All vertebrate species are affected by back or spine conditions or disorders, including working animals, domestic pets, and their owners. All suffer from the associated discomfort, pain, and disability, depending on the degree of disease progression.

[0004] Spinal conditions or disorders, such as low back pain, are complex diseases characterized by a multitude of inputs contributing to a progressive course of disability. Among these contributors are genetic predispositions, lifestyle factors, alterations in mechanical loading, structural/morphological irregularities (e.g., disc herniations or calcifications), inflammation, and changes in the localized cellular environment (e.g., alterations in cellular phenotype, viability, vascularization and/or innervation). Peng, B. G. (2013). World Journal of Orthopedics 4(2), 42-52. Each contributing factor is driven by differential expression of various gene products, including at least pro-inflammatory cytokines, growth factors, pain signaling molecules and other effector biomolecules. New methods and compositions to treat this disease are acutely needed.

### BRIEF SUMMARY OF THE DISCLOSURE

[0005] Provided herein are compositions and methods for treating or preventing localized nociception, inflammation, or morphological changes associated with spinal conditions or disorders, are disclosed herein. Additionally, methods for gene-editing cells, including, but not limited to the cells constituting the nucleus pulposus, annulus fibrosus and disc-associated nociceptors, and uses of gene-edited cells to ameliorate symptoms of diseases, such as discogenic disorders, are disclosed herein.

### BRIEF DESCRIPTION OF THE DRAWINGS

[0006] The presently disclosed embodiments will be further explained with reference to the attached drawings. The drawings shown are not necessarily to scale, with emphasis instead generally being placed upon illustrating the principles of the presently disclosed embodiments.

[0007] FIG. 1 illustrates SEQ ID NOs: 1-48, the crRNA sequences generated by the bioinformatic methods herein described that target human ADAM17 to modify and/or ablate expression of its encoded products. Additional information includes the chromosomal genomic coordinates (assembly hg38) of the edit site and a score, summarizing several predicted performance metrics.

[0008] FIG. 2 illustrates SEQ ID NOs: 49-96, the crRNA sequences generated by the bioinformatic methods herein described that target human ADAMTS1 to modify and/or ablate expression of its encoded products. Additional information includes the chromosomal genomic coordinates (assembly hg38) of the edit site and a score, summarizing several predicted performance metrics.

[0009] FIG. 3 illustrates SEQ ID NOs: 97-144, the crRNA sequences generated by the bioinformatic methods herein described that target human ADAMTS5 to modify and/or ablate expression of its encoded products. Additional information includes the chromosomal genomic coordinates (assembly hg38) of the edit site and a score, summarizing several predicted performance metrics.

[0010] FIG. 4 illustrates SEQ ID NOs: 145-192, the crRNA sequences generated by the bioinformatic methods herein described that target human ADM to modify and/or ablate expression of its encoded products. Additional information includes the chromosomal genomic coordinates (assembly hg38) of the edit site and a score, summarizing several predicted performance metrics.

[0011] FIG. 5 illustrates SEQ ID NOs: 193-240, the crRNA sequences generated by the bioinformatic methods herein described that target human ATP1A1 to modify and/or ablate expression of its encoded products. Additional information includes the chromosomal genomic coordinates (assembly hg38) of the edit site and a score, summarizing several predicted performance metrics.

[0012] FIG. 6 illustrates SEQ ID NOs: 241-281, the crRNA sequences generated by the bioinformatic methods herein described that target human BDNF to modify and/or ablate expression of its encoded products. Additional information includes the chromosomal genomic coordinates (assembly hg38) of the edit site and a score, summarizing several predicted performance metrics.

[0013] FIG. 7 illustrates SEQ ID NOs: 282-301, the crRNA sequences generated by the bioinformatic methods herein described that target human CALCA to modify and/or ablate expression of its encoded products. Additional information includes the chromosomal genomic coordinates (assembly hg38) of the edit site and a score, summarizing several predicted performance metrics.

[0014] FIG. 8 illustrates SEQ ID NOs: 302-318, the crRNA sequences generated by the bioinformatic methods herein described that target human CALCB to modify and/or ablate expression of its encoded products. Additional information includes the chromosomal genomic coordinates (assembly hg38) of the edit site and a score, summarizing several predicted performance metrics.

[0015] FIG. 9 illustrates SEQ ID NOs: 319-340, the crRNA sequences generated by the bioinformatic methods herein described that target human CALCRL to modify and/or ablate expression of its encoded products. Additional information includes the chromosomal genomic coordinates (assembly hg38) of the edit site and a score, summarizing several predicted performance metrics.

[0016] FIG. 10 illustrates SEQ ID NOs: 341-357, the crRNA sequences generated by the bioinformatic methods herein described that target human CCL2 to modify and/or ablate expression of its encoded products. Additional information includes the chromosomal genomic coordinates (assembly hg38) of the edit site and a score, summarizing several predicted performance metrics.

[0017] FIG. 11 illustrates SEQ ID NOs: 358-374, the crRNA sequences generated by the bioinformatic methods herein described that target human CCL3 to modify and/or ablate expression of its encoded products. Additional information includes the chromosomal genomic coordinates (assembly hg38) of the edit site and a score, summarizing several predicted performance metrics.

[0018] FIG. 12 illustrates SEQ ID NOs: 375-391, the crRNA sequences generated by the bioinformatic methods herein described that target human CCL5 to modify and/or ablate expression of its encoded products. Additional information includes the chromosomal genomic coordinates (assembly hg38) of the edit site and a score, summarizing several predicted performance metrics.

[0019] FIG. 13 illustrates SEQ ID NOs: 392-408, the crRNA sequences generated by the bioinformatic methods herein described that target human CCL7 to modify and/or ablate expression of its encoded products. Additional information includes the chromosomal genomic coordinates (assembly hg38) of the edit site and a score, summarizing several predicted performance metrics.

[0020] FIG. 14 illustrates SEQ ID NOs: 409-425, the crRNA sequences generated by the bioinformatic methods herein described that target human CCL20 to modify and/or ablate expression of its encoded products. Additional information includes the chromosomal genomic coordinates (assembly hg38) of the edit site and a score, summarizing several predicted performance metrics.

[0021] FIG. 15 illustrates SEQ ID NOs: 426-473, the crRNA sequences generated by the bioinformatic methods herein described that target human CCN2 to modify and/or ablate expression of its encoded products. Additional information includes the chromosomal genomic coordinates (assembly hg38) of the edit site and a score, summarizing several predicted performance metrics.

[0022] FIG. 16 illustrates SEQ ID NOs: 474-517, the crRNA sequences generated by the bioinformatic methods herein described that target human CCR7 to modify and/or ablate expression of its encoded products. Additional information includes the chromosomal genomic coordinates (assembly hg38) of the edit site and a score, summarizing several predicted performance metrics.

[0023] FIG. 17 illustrates SEQ ID NOs: 518-534, the crRNA sequences generated by the bioinformatic methods herein described that target human CRCP to modify and/or ablate expression of its encoded products. Additional information includes the chromosomal genomic coordinates (assembly hg38) of the edit site and a score, summarizing several predicted performance metrics.

[0024] FIG. 18 illustrates SEQ ID NOs: 535-551, the crRNA sequences generated by the bioinformatic methods herein described that target human CXCL1 to modify and/or ablate expression of its encoded products. Additional information includes the chromosomal genomic coordinates (assembly hg38) of the edit site and a score, summarizing several predicted performance metrics.

[0025] FIG. 19 illustrates SEQ ID NOs: 552-568, the crRNA sequences generated by the bioinformatic methods herein described that target human CXCL2 to modify and/or ablate expression of its encoded products. Additional information includes the chromosomal genomic coordinates (assembly hg38) of the edit site and a score, summarizing several predicted performance metrics.

[0026] FIG. 20 illustrates SEQ ID NOs: 569-585, the crRNA sequences generated by the bioinformatic methods herein described that target human CXCL3 to modify and/or ablate expression of its encoded products. Additional information includes the chromosomal genomic coordinates (assembly hg38) of the edit site and a score, summarizing several predicted performance metrics.

[0027] FIG. 21 illustrates SEQ ID NOs: 586-602, the crRNA sequences generated by the bioinformatic methods herein described that target human CXCL5 to modify and/or ablate expression of its encoded products. Additional information includes the chromosomal genomic coordinates (assembly hg38) of the edit site and a score, summarizing several predicted performance metrics.

[0028] FIG. 22 illustrates SEQ ID NOs: 603-619, the crRNA sequences generated by the bioinformatic methods herein described that target human CXCL6 to modify and/or ablate expression of its encoded products. Additional information includes the chromosomal genomic coordinates (assembly hg38) of the edit site and a score, summarizing several predicted performance metrics.

[0029] FIG. 23 illustrates SEQ ID NOs: 620-636, the crRNA sequences generated by the bioinformatic methods herein described that target human CXCL8 to modify and/or ablate expression of its encoded products. Additional information includes the chromosomal genomic coordinates (assembly hg38) of the edit site and a score, summarizing several predicted performance metrics.

[0030] FIG. 24 illustrates SEQ ID NOs: 637-655, the crRNA sequences generated by the bioinformatic methods herein described that target human CXCR1 to modify and/or ablate expression of its encoded products. Additional information includes the chromosomal genomic coordinates (assembly hg38) of the edit site and a score, summarizing several predicted performance metrics.

[0031] FIG. 25 illustrates SEQ ID NOs: 656-672, the crRNA sequences generated by the bioinformatic methods herein described that target human CXCR2 to modify and/or ablate expression of its encoded products. Additional information includes the chromosomal genomic coordinates (assembly hg38) of the edit site and a score, summarizing several predicted performance metrics.

[0032] FIG. 26 illustrates SEQ ID NOs: 673-720, the crRNA sequences generated by the bioinformatic methods herein described that target human FGF2 to modify and/or ablate expression of its encoded products. Additional information includes the chromosomal genomic coordinates (assembly hg38) of the edit site and a score, summarizing several predicted performance metrics.

[0033] FIG. 27 illustrates SEQ ID NOs: 721-768, the crRNA sequences generated by the bioinformatic methods herein described that target human FGFR1 to modify and/or ablate expression of its encoded products. Additional information includes the chromosomal genomic coordinates (assembly hg38) of the edit site and a score, summarizing several predicted performance metrics.

[0034] FIG. 28 illustrates SEQ ID NOs: 769-786, the crRNA sequences generated by the bioinformatic methods herein described that target human IL1A to modify and/or ablate expression of its encoded products. Additional information includes the chromosomal genomic coordinates (assembly hg38) of the edit site and a score, summarizing several predicted performance metrics.

[0035] FIG. 29 illustrates SEQ ID NOs: 787-805, the crRNA sequences generated by the bioinformatic methods herein described that target human IL1B to modify and/or ablate expression of its encoded products. Additional information includes the chromosomal genomic coordinates (assembly hg38) of the edit site and a score, summarizing several predicted performance metrics.

[0036] FIG. 30 illustrates SEQ ID NOs: 806-839, the crRNA sequences generated by the bioinformatic methods herein described that target human IL1R1 to modify and/or ablate expression of its encoded products. Additional information includes the chromosomal genomic coordinates (assembly hg38) of the edit site and a score, summarizing several predicted performance metrics.

[0037] FIG. 31 illustrates SEQ ID NOs: 840-887, the crRNA sequences generated by the bioinformatic methods herein described that target human IL1RAP to modify and/or ablate expression of its encoded products. Additional information includes the chromosomal genomic coordinates (assembly hg38) of the edit site and a score, summarizing several predicted performance metrics.

[0038] FIG. 32 illustrates SEQ ID NOs: 888-911, the crRNA sequences generated by the bioinformatic methods herein described that target human IL4 to modify and/or ablate expression of its encoded products. Additional information includes the chromosomal genomic coordinates (assembly hg38) of the edit site and a score, summarizing several predicted performance metrics.

[0039] FIG. 33 illustrates SEQ ID NOs: 912-928, the crRNA sequences generated by the bioinformatic methods herein described that target human IL6 to modify and/or ablate expression of its encoded products. Additional information includes the chromosomal genomic coordinates (assembly hg38) of the edit site and a score, summarizing several predicted performance metrics.

[0040] FIG. 34 illustrates SEQ ID NOs: 929-963, the crRNA sequences generated by the bioinformatic methods herein described that target human IL6R to modify and/or ablate expression of its encoded products. Additional information includes the chromosomal genomic coordinates (assembly hg38) of the edit site and a score, summarizing several predicted performance metrics.

[0041] FIG. 35 illustrates SEQ ID NOs: 964-990, the crRNA sequences generated by the bioinformatic methods herein described that target human IL6ST to modify and/or ablate expression of its encoded products. Additional information includes the chromosomal genomic coordinates (assembly hg38) of the edit site and a score, summarizing several predicted performance metrics.

[0042] FIG. 36 illustrates SEQ ID NOs: 991-1007, the crRNA sequences generated by the bioinformatic methods herein described that target human IL10 to modify and/or ablate expression of its encoded products. Additional information includes the chromosomal genomic coordinates (assembly hg38) of the edit site and a score, summarizing several predicted performance metrics.

[0043] FIG. 37 illustrates SEQ ID NOs: 1008-1055, the crRNA sequences generated by the bioinformatic methods herein described that target human IL10RA to modify and/or ablate expression of its encoded products. Additional information includes the chromosomal genomic coordinates (assembly hg38) of the edit site and a score, summarizing several predicted performance metrics.

[0044] FIG. 38 illustrates SEQ ID NOs: 1056-1082, the crRNA sequences generated by the bioinformatic methods herein described that target human IL10RB to modify and/or ablate expression of its encoded products. Additional information includes the chromosomal genomic coordinates (assembly hg38) of the edit site and a score, summarizing several predicted performance metrics.

[0045] FIG. 39 illustrates SEQ ID NOs: 1083-1104, the crRNA sequences generated by the bioinformatic methods herein described that target human IL13 to modify and/or ablate expression of its encoded products. Additional information includes the chromosomal genomic coordinates (assembly hg38) of the edit site and a score, summarizing several predicted performance metrics.

[0046] FIG. 40 illustrates SEQ ID NOs: 1105-1130, the crRNA sequences generated by the bioinformatic methods herein described that target human IL13RA1 to modify and/or ablate expression of its encoded products. Additional information includes the chromosomal genomic coordinates (assembly hg38) of the edit site and a score, summarizing several predicted performance metrics.

[0047] FIG. 41 illustrates SEQ ID NOs: 1131-1147, the crRNA sequences generated by the bioinformatic methods herein described that target human IL13RA2 to modify and/or ablate expression of its encoded products. Additional information includes the chromosomal genomic coordinates (assembly hg38) of the edit site and a score, summarizing several predicted performance metrics.

[0048] FIG. 42 illustrates SEQ ID NOs: 1148-1173, the crRNA sequences generated by the bioinformatic methods herein described that target human IL17A to modify and/or ablate expression of its encoded products. Additional information includes the chromosomal genomic coordinates (assembly hg38) of the edit site and a score, summarizing several predicted performance metrics.

[0049] FIG. 43 illustrates SEQ ID NOs: 1174-1221, the crRNA sequences generated by the bioinformatic methods herein described that target human IL17RA to modify and/or ablate expression of its encoded products. Additional information includes the chromosomal genomic coordinates (assembly hg38) of the edit site and a score, summarizing several predicted performance metrics.

[0050] FIG. 44 illustrates SEQ ID NOs: 1222-1238, the crRNA sequences generated by the bioinformatic methods herein described that target human IL18 to modify and/or ablate expression of its encoded products. Additional information includes the chromosomal genomic coordinates (assembly hg38) of the edit site and a score, summarizing several predicted performance metrics.

[0051] FIG. 45 illustrates SEQ ID NOs: 1239-1262, the crRNA sequences generated by the bioinformatic methods herein described that target human IL18R1 to modify and/or ablate expression of its encoded products. Additional information includes the chromosomal genomic coordinates (assembly hg38) of the edit site and a score, summarizing several predicted performance metrics.

[0052] FIG. 46 illustrates SEQ ID NOs: 1263-1310, the crRNA sequences generated by the bioinformatic methods herein described that target human IL18RAP to modify and/or ablate expression of its encoded products. Additional information includes the chromosomal genomic coordinates (assembly hg38) of the edit site and a score, summarizing several predicted performance metrics.

[0053] FIG. 47 illustrates SEQ ID NOs: 1311-1343, the crRNA sequences generated by the bioinformatic methods herein described that target human MMP1 to modify and/or ablate expression of its encoded products. Additional information includes the chromosomal genomic coordinates (assembly hg38) of the edit site and a score, summarizing several predicted performance metrics.

[0054] FIG. 48 illustrates SEQ ID NOs: 1344-1391, the crRNA sequences generated by the bioinformatic methods herein described that target human MMP2 to modify and/or ablate expression of its encoded products. Additional information includes the chromosomal genomic coordinates (assembly hg38) of the edit site and a score, summarizing several predicted performance metrics.

[0055] FIG. 49 illustrates SEQ ID NOs: 1392-1417, the crRNA sequences generated by the bioinformatic methods herein described that target human MMP3 to modify and/or ablate expression of its encoded products. Additional information includes the chromosomal genomic coordinates (assembly hg38) of the edit site and a score, summarizing several predicted performance metrics.

[0056] FIG. 50 illustrates SEQ ID NOs: 1418-1436, the crRNA sequences generated by the bioinformatic methods herein described that target human MMP7 to modify and/or ablate expression of its encoded products. Additional information includes the chromosomal genomic coordinates (assembly hg38) of the edit site and a score, summarizing several predicted performance metrics.

[0057] FIG. 51 illustrates SEQ ID NOs: 1437-1474, the crRNA sequences generated by the bioinformatic methods herein described that target human MMP8 to modify and/or ablate expression of its encoded products. Additional information includes the chromosomal genomic coordinates (assembly hg38) of the edit site and a score, summarizing several predicted performance metrics.

[0058] FIG. 52 illustrates SEQ ID NOs: 1475-1497, the crRNA sequences generated by the bioinformatic methods herein described that target human MMP10 to modify and/or ablate expression of its encoded products. Additional information includes the chromosomal genomic coordinates (assembly hg38) of the edit site and a score, summarizing several predicted performance metrics.

[0059] FIG. 53 illustrates SEQ ID NOs: 1498-1541, the crRNA sequences generated by the bioinformatic methods herein described that target human MMP12 to modify and/or ablate expression of its encoded products. Additional information includes the chromosomal genomic coordinates (assembly hg38) of the edit site and a score, summarizing several predicted performance metrics.

[0060] FIG. 54 illustrates SEQ ID NOs: 1542-1568, the crRNA sequences generated by the bioinformatic methods herein described that target human MMP13 to modify and/or ablate expression of its encoded products. Additional information includes the chromosomal genomic coordinates (assembly hg38) of the edit site and a score, summarizing several predicted performance metrics.

[0061] FIG. 55 illustrates SEQ ID NOs: 1569-1585, the crRNA sequences generated by the bioinformatic methods herein described that target human MRGPRX2 to modify and/or ablate expression of its encoded products. Additional information includes the chromosomal genomic coordinates (assembly hg38) of the edit site and a score, summarizing several predicted performance metrics.

[0062] FIG. 56 illustrates SEQ ID NOs: 1586-1628, the crRNA sequences generated by the bioinformatic methods herein described that target human NGF to modify and/or ablate expression of its encoded products. Additional information includes the chromosomal genomic coordinates (assembly hg38) of the edit site and a score, summarizing several predicted performance metrics.

[0063] FIG. 57 illustrates SEQ ID NOs: 1629-1676, the crRNA sequences generated by the bioinformatic methods herein described that target human NGFR to modify and/or ablate expression of its encoded products. Additional information includes the chromosomal genomic coordinates (assembly hg38) of the edit site and a score, summarizing several predicted performance metrics.

[0064] FIG. 58 illustrates SEQ ID NOs: 1677-1724, the crRNA sequences generated by the bioinformatic methods herein described that target human NTF3 to modify and/or ablate expression of its encoded products. Additional information includes the chromosomal genomic coordinates (assembly hg38) of the edit site and a score, summarizing several predicted performance metrics.

[0065] FIG. 59 illustrates SEQ ID NOs: 1725-1746, the crRNA sequences generated by the bioinformatic methods herein described that target human NTF4 to modify and/or ablate expression of its encoded products. Additional information includes the chromosomal genomic coordinates (assembly hg38) of the edit site and a score, summarizing several predicted performance metrics.

[0066] FIG. 60 illustrates SEQ ID NOs: 1747-1794, the crRNA sequences generated by the bioinformatic methods herein described that target human NTRK1 to modify and/or ablate expression of its encoded products. Additional information includes the chromosomal genomic coordinates (assembly hg38) of the edit site and a score, summarizing several predicted performance metrics.

[0067] FIG. 61 illustrates SEQ ID NOs: 1795-1842, the crRNA sequences generated by the bioinformatic methods herein described that target human NTRK2 to modify and/or ablate expression of its encoded products. Additional information includes the chromosomal genomic coordinates (assembly hg38) of the edit site and a score, summarizing several predicted performance metrics.

[0068] FIG. 62 illustrates SEQ ID NOs: 1843-1859, the crRNA sequences generated by the bioinformatic methods herein described that target human RAMP1 to modify and/or ablate expression of its encoded products. Additional information includes the chromosomal genomic coordinates (assembly hg38) of the edit site and a score, summarizing several predicted performance metrics.

[0069] FIG. 63 illustrates SEQ ID NOs: 1860-1907, the crRNA sequences generated by the bioinformatic methods herein described that target human SCN1A to modify and/or ablate expression of its encoded products. Additional information includes the chromosomal genomic coordinates (assembly hg38) of the edit site and a score, summarizing several predicted performance metrics.

[0070] FIG. 64 illustrates SEQ ID NOs: 1908-1955, the crRNA sequences generated by the bioinformatic methods herein described that target human SCN2A to modify and/or ablate expression of its encoded products. Additional information includes the chromosomal genomic coordinates (assembly hg38) of the edit site and a score, summarizing several predicted performance metrics.

[0071] FIG. 65 illustrates SEQ ID NOs: 1956-2003, the crRNA sequences generated by the bioinformatic methods herein described that target human SCN3A to modify and/or ablate expression of its encoded products. Additional information includes the chromosomal genomic coordinates (assembly hg38) of the edit site and a score, summarizing several predicted performance metrics.

[0072] FIG. 66 illustrates SEQ ID NOs: 2004-2051, the crRNA sequences generated by the bioinformatic methods herein described that target human SCN4A to modify and/or ablate expression of its encoded products. Additional information includes the chromosomal genomic coordinates (assembly hg38) of the edit site and a score, summarizing several predicted performance metrics.

[0073] FIG. 67 illustrates SEQ ID NOs: 2052-2099, the crRNA sequences generated by the bioinformatic methods herein described that target human SCN5A to modify and/or ablate expression of its encoded products. Additional information includes the chromosomal genomic coordinates (assembly hg38) of the edit site and a score, summarizing several predicted performance metrics.

[0074] FIG. 68 illustrates SEQ ID NOs: 2100-2147, the crRNA sequences generated by the bioinformatic methods herein described that target human SCN8A to modify and/or ablate expression of its encoded products. Additional information includes the chromosomal genomic coordinates (assembly hg38) of the edit site and a score, summarizing several predicted performance metrics.

[0075] FIG. 69 illustrates SEQ ID NOs: 2148-2195, the crRNA sequences generated by the bioinformatic methods herein described that target human SCN9A to modify and/or ablate expression of its encoded products. Additional information includes the chromosomal genomic coordinates (assembly hg38) of the edit site and a score, summarizing several predicted performance metrics.

[0076] FIG. 70 illustrates SEQ ID NOs: 2196-2243, the crRNA sequences generated by the bioinformatic methods herein described that target human SCN10A to modify and/or ablate expression of its encoded products. Additional information includes the chromosomal genomic coordinates (assembly hg38) of the edit site and a score, summarizing several predicted performance metrics.

[0077] FIG. 71 illustrates SEQ ID NOs: 2244-2291, the crRNA sequences generated by the bioinformatic methods herein described that target human SCN11A to modify and/or ablate expression of its encoded products. Additional information includes the chromosomal genomic coordinates (assembly hg38) of the edit site and a score, summarizing several predicted performance metrics.

[0078] FIG. 72 illustrates SEQ ID NOs: 2292-2308, the crRNA sequences generated by the bioinformatic methods herein described that target human TACT to modify and/or ablate expression of its encoded products. Additional information includes the chromosomal genomic coordinates (assembly hg38) of the edit site and a score, summarizing several predicted performance metrics.

[0079] FIG. 73 illustrates SEQ ID NOs: 2309-2325, the crRNA sequences generated by the bioinformatic methods herein described that target human TAC3 to modify and/or ablate expression of its encoded products. Additional information includes the chromosomal genomic coordinates (assembly hg38) of the edit site and a score, summarizing several predicted performance metrics.

[0080] FIG. 74 illustrates SEQ ID NOs: 2326-2373, the crRNA sequences generated by the bioinformatic methods herein described that target human TACR1 to modify and/or ablate expression of its encoded products. Additional information includes the chromosomal genomic coordinates (assembly hg38) of the edit site and a score, summarizing several predicted performance metrics.

[0081] FIG. 75 illustrates SEQ ID NOs: 2374-2421, the crRNA sequences generated by the bioinformatic methods herein described that target human TACR2 to modify and/or ablate expression of its encoded products. Additional information includes the chromosomal genomic coordinates (assembly hg38) of the edit site and a score, summarizing several predicted performance metrics.

[0082] FIG. 76 illustrates SEQ ID NOs: 2422-2469, the crRNA sequences generated by the bioinformatic methods herein described that target human TACR3 to modify and/or ablate expression of its encoded products. Additional information includes the chromosomal genomic coordinates (assembly hg38) of the edit site and a score, summarizing several predicted performance metrics.

[0083] FIG. 77 illustrates SEQ ID NOs: 2470-2509, the crRNA sequences generated by the bioinformatic methods herein described that target human TIMP1 to modify and/or ablate expression of its encoded products. Additional information includes the chromosomal genomic coordinates (assembly hg38) of the edit site and a score, summarizing several predicted performance metrics.

[0084] FIG. 78 illustrates SEQ ID NOs: 2510-2557, the crRNA sequences generated by the bioinformatic methods herein described that target human TIMP3 to modify and/or ablate expression of its encoded products. Additional information includes the chromosomal genomic coordinates (assembly hg38) of the edit site and a score, summarizing several predicted performance metrics.

[0085] FIG. 79 illustrates SEQ ID NOs: 2558-2574, the crRNA sequences generated by the bioinformatic methods herein described that target human TNF to modify and/or ablate expression of its encoded products. Additional information includes the chromosomal genomic coordinates (assembly hg38) of the edit site and a score, summarizing several predicted performance metrics.

[0086] FIG. 80 illustrates SEQ ID NOs: 2575-2622, the crRNA sequences generated by the bioinformatic methods herein described that target human TNFRSF1A to modify and/or ablate expression of its encoded products. Additional information includes the chromosomal genomic coordinates (assembly hg38) of the edit site and a score, summarizing several predicted performance metrics.

[0087] FIG. 81 illustrates SEQ ID NOs: 2623-2670, the crRNA sequences generated by the bioinformatic methods herein described that target human TNFRSF1B to modify and/or ablate expression of its encoded products. Additional information includes the chromosomal genomic coordinates (assembly hg38) of the edit site and a score, summarizing several predicted performance metrics.

[0088] FIG. 82 illustrates SEQ ID NOs: 2671-2718, the crRNA sequences generated by the bioinformatic methods herein described that target human YAP1 to modify and/or ablate expression of its encoded products. Additional information includes the chromosomal genomic coordinates (assembly hg38) of the edit site and a score, summarizing several predicted performance metrics.

[0089] FIGS. 79A, 79B, 79C, 79D, 79E, 79F, 79G, and 79H collectively illustrate SEQ ID NOs: 3186-3349, (A-D) the crRNA sequences generated by the bioinformatic methods herein described that target human IL1RAP to generate a genetic knockout, a soluble decoy receptor, a membrane-bound decoy receptor or other form and (E-H) additional information regarding the chromosome 3 genomic coordinates (assembly hg38) of the bound DNA, DNA strand targeted, exon targeted, and several predicted performance metrics.

[0090] FIGS. 80A, 80B, 80C, 80D, 80E, and 80F collectively illustrate SEQ ID NOs: 3350-3485 (A-C) the crRNA sequences generated by the bioinformatic methods herein described that target canine IL1RAP to generate a genetic knockout, a soluble decoy receptor, a membrane-bound decoy receptor, or other form and (D-F) additional information includes the chromosome 34 genomic coordinates (assembly canFam3) of the bound DNA, the DNA strand targeted, the exon targeted, and several predicted performance metrics.

[0091] FIGS. 81A, 81B, and 81C collectively illustrate SEQ ID NOs: 3485-3561, the crRNA sequences generated by the bioinformatic methods herein described that target equine IL1RAP to generate (A) a genetic knockout, (B) a soluble decoy receptor, or (C) a membrane-bound decoy receptor. Additional information includes the chromosome 19 genomic coordinates (assembly equCab3) of the bound DNA, the DNA strand targeted, the exon targeted, and several predicted performance metrics.

[0092] FIGS. 82A, 82B, and 82C collectively illustrate SEQ ID NOs: 3562-3636, the crRNA sequences generated by the bioinformatic methods herein described that target feline IL1RAP to generate (A) a genetic knockout, (B) a soluble decoy receptor, or (C) a membrane-bound decoy receptor. Additional information includes where the chromosome C2 genomic coordinates (assembly felCat9) bound, DNA strand targeted, exon targeted, and several predicted performance metrics.

[0093] FIGS. 84A, 84B, 84C, 84D, 84E, and 84F collectively illustrate SEQ ID NOs: 3637-3780 (A-D) the crRNA sequences generated by the bioinformatic methods herein described that target human IL1R1 to generate a genetic knockout, a soluble decoy receptor, a membrane-bound decoy receptor, or other form and (E-H) additional information regarding the chromosome 2 genomic coordinates (assembly hg38) of the bound DNA, DNA strand targeted, exon targeted, and several predicted performance metrics.

[0094] FIGS. 85A, 85B, 85C, 85D, 85E, 85F, 85G, and 85H collectively illustrate SEQ ID NOs: 3781-3931 (A-D) the crRNA sequences generated by the bioinformatic methods herein described that target canine IL1R1 to generate a genetic knockout, a soluble decoy receptor, or a membrane-bound decoy receptor, or other form and (E-H) additional information includes the chromosome 10 genomic coordinates (assembly canFam3) of the bound DNA, the DNA strand targeted, the exon targeted, and several predicted performance metrics.

[0095] FIGS. 86A, 86B, and 86C collectively illustrate SEQ ID NOs: 3932-4005, the crRNA sequences generated by the bioinformatic methods herein described that target equine IL1R1 to generate (A) a genetic knockout, (B) a soluble decoy receptor, or (C) a membrane-bound decoy receptor. Additional information includes the chromosome 15 genomic coordinates (assembly equCab3) of the bound DNA, the DNA strand targeted, the exon targeted, and several predicted performance metrics.

[0096] FIGS. 87A, 87B, and 87C collectively illustrate SEQ ID NOs: 4006-4076, the crRNA sequences generated by the bioinformatic methods herein described that target feline IL1R1 to generate (A) a genetic knockout, (B) a soluble decoy receptor, or (C) a membrane-bound decoy receptor. Additional information includes the chromosome A3 genomic coordinates (assembly felCat9) of the bound DNA, the DNA strand targeted, the exon targeted, and several predicted performance metrics.

[0097] FIG. 88 illustrates SEQ ID NOs: XXXX-XXXX, the crRNA sequences generated by the bioinformatic methods herein described that target the human IL1RA gene to modify and/or ablate expression of its encoded products. Additional information includes the chromosomal genomic coordinates (assembly hg38) of the edit site and a score, summarizing several predicted performance metrics.

[0098] FIG. 89 illustrates SEQ ID NOs: XXXX-XXXX, the crRNA sequences generated by the bioinformatic methods herein described that target the human IL1RB gene to modify and/or ablate expression of its encoded products. Additional information includes the chromosomal genomic coordinates (assembly hg38) of the edit site and a score, summarizing several predicted performance metrics.

[0099] FIGS. 90A and 90B illustrate the design of exemplary sgRNAs that target canine IL1R1, including (A) a summary of select sgRNAs based on off-target risks, on-target efficacy, and frameshift likelihood and (B) AlphaFold2 models of wild-type and decoy IL1R1 receptors, as predicted to be generated by OCR13 and OCR14.

[0100] FIG. 91 illustrates the in vitro performance of the tested sgRNA candidates that target canine IL1RAP, as deduced from Sanger traces. ND, not determined.

[0101] FIGS. 92A, 92B, 92C, and 92D illustrate the effect of various SpCas9 variants on the in-vitro editing performance of select candidate sgRNAs that target canine IL1R1.

[0102] FIGS. 93A and 93B illustrate the design of exemplary sgRNAs that target canine IL1RAP, including (A) a summary of select sgRNAs based on off-target risks, on-target efficiency and frameshift likelihood and (B) AlphaFold2-predicted models of the 3D structure of normal and OCP07-edited IL1RAP.

[0103] FIG. 94 illustrates the in vitro performance of the tested sgRNA candidates that target canine IL1RAP, as deduced from Sanger traces.

[0104] FIGS. 95A, 95B, 95C illustrate (A) select sgRNAs targeting IL1RAP for testing and their editing efficacy with wildtype SpCas9 (WT-Cas9), (B) the effect of the indicated SpCas9 variants on editing efficacy in canine monocytes and (C) a comparison of editing efficacy between AR-Cas9 and WT-Cas9 in canine synovial fibroblasts.

[0105] FIGS. 96A, 96B, and 96C illustrate the editing efficacy of the indicated IL1RAP-directed sgRNAs in (A) canine monocytes, (B) canine chondrocytes and (C) canine synovial fibroblasts.

[0106] FIG. 97 illustrates results of a primary screen of hIL1RAP-targeted sgRNAs in HEK cells. Synthetic sgRNA candidates were paired with wild-type SpCas9 protein and electroporated into HEK cells. After two days, cells were genotyped by inferring CRISPR edits from Sanger sequencing traces (ICE v3). Top and other ICE-predicted (R²>0.90) edits contributing to translational frameshifts are summarised here. Due to its high editing efficacy and precision (i.e. only one edit was detectable) sgRNA OHP06 was selected first for an on-target activity study in primary nucleus pulposus cells.

[0107] FIGS. 98A, 98B and 98C collectively illustrate the CRISPR editing of the human IL1RAP gene in nucleus pulposus cells of the intervertebral disc. (A) Synthetic single guide RNA (sgRNA) OHP06 was paired with wild-type SpCas9 protein, electroporated into nucleus pulposus cells, which were genotyped after two to three days in culture. The CRISPR-mediated frameshift in the coding sequence of the human IL1RAP gene was inferred from Sanger sequencing traces using ICE software (v1.2 and v3). The average frameshift efficacy was 94% (R^{2′}0.90) with most detected edits (93%) being one single T duplication (dup). Error bars show the standard deviation from the mean. (B) Panel shows the position of sgRNA OHP06 in exon 8 of the human IL1RAP gene encoding Ig-like C2-type 3 and aligned Sanger traces from control and CRISPR-edited nucleus pulposus cells. The duplicated T is framed. (C) AlphaFold2-PTM (with template from pdb70 database and otherwise default settings) was used to predict the 3D structures of wild-type and CRISPR-edited IL1RAP. The T duplication caused a frameshift (fs) at amino acid position 266 converting Cysteine (Cys) into Leucine (Leu) and prematurely terminating translation at codon position 6 as counted from the first changed amino acid to the premature stop codon (Cys266Leufs*6). The mutant IL1RAP lacks the last of three Ig-like C2-type domains as well as the transmembrane and TIR domain.

### DETAILED DESCRIPTION OF THE DISCLOSURE

### I. Introduction

[0108] Provided herein are compositions and methods for silencing the the translation of one or more proteins in an animal in need thereof to treat a disease, illness or condition associated with localized pain (i.e., nociception). In some embodiments, this pain is localized to the back and/or spine. In some embodiments, the pain arises from a discogenic disorder (e.g., IDD).

[0109] In some embodiments, pain is ameliorated by silencing of a nociception signaling protein (or its cognate receptor) via CRISPR editing of the gene encoding the protein (or receptor). In some embodiments, the CRISPR editing results in ablation of atransmembrane domain of a pain receptor (i.e., generation of a soluble decoy receptor). In some embodiments, the CRISPR editing results in ablation of the cytoplasmic domain of a pain receptor (i.e., generation of a membrane-bound decoy receptor). In particular embodiments, compositions and methods are provided to gene-edit (i) one or more growth factors or growth factor receptors (e.g., FGF2, CCN2, NGF, NTF3, NTF4, BDNF, FGFR1, NGFR, NTRK1, or NTRK2), (ii) one or more metalloproteases or regulators thereof (e.g., ADAM17, ADAMTS1, ADAMTS5, MMP1, MMP2, MMP3, MMP7, MMP8, MMP10, MMP12, MMP13, TIMP1, or TIMP3), (iii) one or more cytokines, chemokines or cytokine/chemokine receptors (e.g., CXCL1, CXCL2, CXCL3, CXCL5, CXCL6, CXCL8, CCL2, CCL3, CCL5, CCL7, CCL20, IL1A, IL1B, IL4, IL6, IL6ST, IL10, IL13, IL17A, IL18, TNF, CXCR1, CXCR2, CCR7, TNFRSF1A, TNFRSF1B, IL1R1, IL1RAP, IL4R, IL6R, IL10RA, IL10RB, IL13RA1, IL13RA2, IL17RA, IL18R1, or IL18RAP), (iv) one or more regulators of neuronal signaling (e.g., SCN1A, SCN2A, SCN3A, SCN4A, SCN5A, SCN8A, SCN9A, SCN10A, SCN11A, TAC1, TAC3, TACR1, TACR2, TACR3, or ATP1A1), (v) one or more other regulators of cell signaling (e.g., CALCA, CALCB, CALCRL, RAMP1, ADM, CRCP, YAP1, MRGPRX2), or (vi) a combination of any genes of (i)-(v) to ameliorate pain.

### II. Definitions

[0110] Provided herein are compositions and methods for silencing the translation of one or more proteins in an animal in need thereof to treat a disease, illness or condition associated with localized pain (e.g., nociception). In some embodiments, this pain is localized to the back and/or spine. In some embodiments, the pain arises from a discogenic disorder (e.g., DDD).

[0111] In some embodiments, pain is ameliorated by silencing of a nociception signaling protein (or its cognate receptor) via CRISPR editing of the gene encoding the protein (or receptor). In some embodiments, the CRISPR editing results in ablation of a transmembrane domain of a pain receptor (i.e., generation of a soluble decoy receptor). In some embodiments, the CRISPR editing results in ablation of the cytoplasmic domain of a pain receptor (i.e., generation of a membrane-bound decoy receptor). In particular embodiments, compositions and methods are provided to gene-edit (i) one or more growth factors or growth factor receptors (e.g., FGF2, CCN2, NGF, NTF3, NTF4, BDNF, FGFR1, NGFR, NTRK1, or NTRK2), (ii) one or more metalloproteases or regulators thereof (e.g., ADAM17, ADAMTS1, ADAMTS5, MMP1, MMP2, MMP3, MMP7, MMP8, MMP10, MMP12, MMP13, TIMP1, or TIMP3), (iii) one or more cytokines, chemokines or cytokine/chemokine receptors (e.g., CXCL1, CXCL2, CXCL3, CXCL5, CXCL6, CXCL8, CCL2, CCL3, CCL5, CCL7, CCL20, IL1A, IL1B, IL4, IL6, IL6ST, IL10, IL13, IL17A, IL18, TNF, CXCR1, CXCR2, CCR7, TNFRSF1A, TNFRSF1B, IL1R1, IL1RAP, IL4R, IL6R, IL10RA, IL10RB, IL13RA1, IL13RA2, IL17RA, IL18R1, or IL18RAP), (iv) one or more regulators of neuronal signaling (e.g., SCN1A, SCN2A, SCN3A, SCN4A, SCN5A, SCN8A, SCN9A, SCN10A, SCN11A, TAC1, TAC3, TACR1, TACR2, TACR3, or ATP1A1), (v) one or more other regulators of cell signaling (e.g., CALCA, CALCB, CALCRL, RAMP1, ADM, CRCP, YAP1, MRGPRX2), or (vi) a combination of any genes of (i)-(v) to ameliorate pain.

### Definitions

[0112] Unless defined otherwise, all technical and scientific terms used herein have the same meaning as is commonly understood by one of skill in the art to which this disclosure belongs. All patents and publications referred to herein are incorporated by reference in their entireties.

[0113] The term “FGF2 gene” refers to a mammalian gene encoding a Fibroblast growth factor 2 polypeptide. Non-limiting examples of FGF2 genes include: NCBI Gene ID: 2247 [human], NCBI Gene ID: 403857 [canine], NCBI Gene ID: 100033955 [equine], NCBI Gene ID: 100135772 [feline], as well as synonymous and non-synonymous sequence variants thereof. Non-limiting examples of gene products encoded by an FGF2 gene include: UniProt: P09038; NP_001348594.1 [human], XP_038421156.1 [canine], NP_001182150.1 [equine], XP_044911834.1 [feline]), as well as sequence variants, isoforms encoded by alternative splicing, and various glycoforms thereof. Canonically, the proteins encoded by the genes listed above act as ligands for the FGF receptors FGFR1, FGFR2, FGFR3 and FGFR4 in addition to strongly binding heparin and integrins. Additionally, FGF2 signaling is thought to impact localized nociception via at least its pro-angiogenic activity and has been implicated in pain perception related to at least IVD degeneration and at joint lesions. In some instances, and merely for the sake of disambiguation, a prefix is added when referring to the protein or gene of a particular species (with h, c, e, and f referring to the human, canine, equine, and feline forms, respectively).

[0114] The term “FGFR1 gene” refers to a mammalian gene encoding a Fibroblast Growth Factor Receptor 1 polypeptide. Non-limiting examples of FGFR1 genes include: NCBI Gene ID: 2260 [human], NCBI Gene ID: 100856477 [canine], NCBI Gene ID: 100057614 [equine], NCBI Gene ID: 101086055 [feline] as well as synonymous and non-synonymous sequence variants thereof. Non-limiting examples of gene products encoded by an FGFR1 gene include: UniProt: P11362; NP_001167534.1 [human], XP_038545782.1 [canine], XP_023486323.1 [equine], XP_011279822.1 [feline], as well as sequence variants, isoforms encoded by alternative splicing, and various glycoforms thereof. Canonically, the proteins encoded by the genes listed above are tyrosine-protein kinases that act as cell-surface receptor for fibroblast growth factors. In that role, they play an essential role in the regulation of embryonic development, cell proliferation, differentiation and migration. In some instances, and merely for the sake of disambiguation, a prefix is added when referring to the protein or gene of a particular species (with h, c, e, and f referring to the human, canine, equine, and feline forms, respectively).

[0115] The term “CCN2 gene” refers to a mammalian gene encoding a Cellular Communication Network Factor 2 polypeptide (also known as Connective Tissue Growth Factor, CTGF). Non-limiting examples of CCN2 genes include: NCBI Gene ID: 1490 [human], NCBI Gene ID: 476202 [canine], NCBI Gene ID: 100073098 [equine], NCBI Gene ID: 101094598 [feline], as well as synonymous and non-synonymous sequence variants thereof. Non-limiting examples of gene products encoded by a CCN2 gene include: UniProt: P29279; NP_001892.2 [human], XP_038321343.1 [canine], XP_023506869.1 [equine], XP_023110145.1 [feline], as well as sequence variants, isoforms encoded by alternative splicing, and various glycoforms thereof. Canonically, the proteins encoded by the genes listed above are mitogens secreted by vascular endothelial cells and are related to chondrocyte proliferation and differentiation, cell adhesion in many cell types. In some instances, and merely for the sake of disambiguation, a prefix is added when referring to the protein or gene of a particular species (with h, c, e, and f referring to the human, canine, equine, and feline forms, respectively).

[0116] The term “ADAMTS5 gene” refers to a mammalian gene encoding an ADAM Metallopeptidase with Thrombospondin Type 1 Motif 5 polypeptide. Non-limiting examples of ADAMTS5 genes include: NCBI Gene ID: 11096 [human], NCBI Gene ID: 487713 [canine], NCBI Gene ID: 100066005 [equine], NCBI Gene ID: 101085063 [feline], as well as synonymous and non-synonymous sequence variants thereof. Non-limiting examples of gene products encoded by an ADAMTS5 gene include: UniProt: Q9UNA0; NP_008969.2 [human], XP_038299214.1 [canine], XP_023485737.1 [equine], XP_023094603.1 [feline], as well as sequence variants, isoforms encoded by alternative splicing, and various glycoforms thereof. Canonically, members of the family share several distinct protein modules, including a propeptide region, a metalloproteinase domain, a disintegrin-like domain, and a thrombospondin type 1 (TS) motif with individual members of the family differing in the number of C-terminal TS motifs. ADAMTS5 has two unique C-terminal domains. Once proteolytically processed to generate the mature enzyme, ADAMTS5 functions as an aggrecanase that cleaves aggrecan, a major proteoglycan of cartilage, and may mediate cartilage destruction in osteoarthritis. In some instances, and merely for the sake of disambiguation, a prefix is added when referring to the protein or gene of a particular species (with h, c, e, and f, referring to the human, canine, equine, and feline forms, respectively).

[0117] The term “ADAMTS1 gene” refer to a mammalian gene encoding an ADAM Metallopeptidase with Thrombospondin Type 1 Motif 1 polypeptide. Non-limiting examples of ADAMTS1 genes include: NCBI Gene ID: 9510 [human], NCBI Gene ID: 100686153 [canine], NCBI Gene ID: 791251 [equine], NCBI Gene ID: 101085309 [feline], as well as synonymous and non-synonymous sequence variants thereof. Non-limiting examples of gene products encoded by an ADAMTS1 gene include: UniProt: Q9UHI8; NP_008919.3 [human], XP_038374156.1 [canine], XP_023485736.1 [equine], XP_019695041.3 [feline], as well as sequence variants, isoforms encoded by alternative splicing, and various glycoforms thereof. Canonically, members of the family share several distinct protein modules, including a propeptide region, a metalloproteinase domain, a disintegrin-like domain, and a thrombospondin type 1 (TS) motif with individual members of the family differing in the number of C-terminal TS motifs. ADAMTS1 contains two disintegrin loops and three C-terminal TS motifs. The protein has anti-angiogenic activity and functions as an aggrecanase that cleaves aggrecan, a major proteoglycan of cartilage, and may be involved in its turnover and has been associated with various inflammatory processes. In some instances, and merely for the sake of disambiguation, a prefix is added when referring to the protein or gene of a particular species (with h, c, e, and f, referring to the human, canine, equine, and feline forms, respectively).

[0118] The term “MMP1 gene” refers to a mammalian gene encoding a Matrix Metalloproteinase 1 polypeptide. Non-limiting examples of MMP1 genes include: NCBI Gene ID: 4312 [human], NCBI Gene ID: 489428 [canine], NCBI Gene ID: 100033896 [equine], NCBI Gene ID: 101084217 [feline], as well as synonymous and non-synonymous sequence variants thereof. Non-limiting examples of gene products encoded by an MMP1 gene include: UniProt: P03956; NP_001139410.1 [human], XP_038521018.1 [canine], NP_001075316.1 [equine], XP_003992365.2 [feline], as well as sequence variants, isoforms encoded by alternative splicing, and various glycoforms thereof. Canonically, MMP1 is proteolytically processed from a preproprotein to generate the mature protease. This secreted protease breaks down the interstitial collagens, including types I, II, and III. In some instances, and merely for the sake of disambiguation, a prefix is added when referring to the protein or gene of a particular species (with h, c, e, and f, referring to the human, canine, equine, and feline forms, respectively).

[0119] The term “MMP2 gene” refers to a mammalian gene encoding a Matrix Metalloproteinase 2 polypeptide. Non-limiting examples of MMP2 genes include: NCBI Gene ID: 4313 [human], NCBI Gene ID: 403733 [canine], NCBI Gene ID: 100033948 [equine], NCBI Gene ID: 101098838 [feline], as well as synonymous and non-synonymous sequence variants thereof. Non-limiting examples of gene products encoded by an MMP2 gene include: UniProt: P08253; NP_001121363.1 [human], XP_038515255.1 [canine], XP_023492775.1 [equine], XP_003998091.2 [feline], as well as sequence variants, isoforms encoded by alternative splicing, and various glycoforms thereof. Canonically, the protein encoded by this gene belongs to the broader family of zinc-dependent enzymes that cleave components of the extracellular matrix. MMP2 is a gelatinase A, type IV collagenase, that contains three fibronectin type II repeats in its catalytic site that allow binding of denatured type IV and V collagen and elastin. In some instances, and merely for the sake of disambiguation, a prefix is added when referring to the protein or gene of a particular species (with h, c, e, and f referring to the human, canine, equine, and feline forms, respectively).

[0120] The term “MMP3 gene” refers to a mammalian gene encoding a Matrix Metalloproteinase 3 polypeptide. Non-limiting examples of MMP3 genes include: NCBI Gene ID: 4314 [human], NCBI Gene ID: 403733 [canine], NCBI Gene ID: 100034195 [equine], NCBI Gene ID: 493666 [feline], as well as synonymous and non-synonymous sequence variants thereof. Non-limiting examples of gene products encoded by an MMP3 gene include: UniProt: P08254; NP_002413.1 [human], NP_001002967.1 [canine], NP_001075964.1 [equine], XP_003992356.2 [feline], as well as sequence variants, isoforms encoded by alternative splicing, and various glycoforms thereof. Canonically, the protein encoded by this gene belongs to the broader family of zinc-dependent enzymes that cleave components of the extracellular matrix. MMP3 is an enzyme that degrades fibronectin, laminin, collagens III, IV, IX, and X, and cartilage proteoglycans and is thought to be involved in wound repair, progression of atherosclerosis, and tumor initiation. In some instances, and merely for the sake of disambiguation, a prefix is added when referring to the protein or gene of a particular species (with h, c, e, and f referring to the human, canine, equine, and feline forms, respectively).

[0121] The term “MMP7 gene” refers to a mammalian gene encoding a Matrix Metalloproteinase 7 polypeptide. Non-limiting examples of MMP7 genes include: NCBI Gene ID: 4316 [human], NCBI Gene ID: 489432 [canine], NCBI Gene ID: 100068985 [equine], NCBI Gene ID: 727698 [feline], as well as synonymous and non-synonymous sequence variants thereof. Non-limiting examples of gene products encoded by an MMP7 gene include: UniProt: P09237; NP_002414.1 [human], NP_001229655.1 [canine], XP_001498859.1 [equine], XP_003992352.1 [feline], as well as sequence variants, isoforms encoded by alternative splicing, and various glycoforms thereof. Canonically, the protein encoded by this gene belongs to the broader family of zinc-dependent enzymes that cleave components of the extracellular matrix. MMP7 is proteolytically processed to generate the mature protease, which breaks down proteoglycans, fibronectin, elastin and casein in addition to activating procollegnase. In some instances, and merely for the sake of disambiguation, a prefix is added when referring to the protein or gene of a particular species (with h, c, e, and f referring to the human, canine, equine, and feline forms, respectively).

[0122] The term “MMP8 gene” refers to a mammalian gene encoding a Matrix Metalloproteinase 8 polypeptide. Non-limiting examples of MMP8 genes include: NCBI Gene ID: 4317 [human], NCBI Gene ID: 489429 [canine], NCBI Gene ID: 100069005 [equine], NCBI Gene ID: 101080995 [feline], as well as synonymous and non-synonymous sequence variants thereof. Non-limiting examples of gene products encoded by an MMP8 gene include: UniProt: P22894; NP_001291370.1 [human], XP_038521019.1 [canine], XP_005611595.1 [equine], XP_003992354.3 [feline], as well as sequence variants, isoforms encoded by alternative splicing, and various glycoforms thereof. Canonically, the protein encoded by this gene belongs to the broader family of zinc-dependent enzymes that cleave components of the extracellular matrix. MMP8 is an enzyme that degrades interstitial collagens. In some instances, and merely for the sake of disambiguation, a prefix is added when referring to the protein or gene of a particular species (with h, c, e, and f referring to the human, canine, equine, and feline forms, respectively).

[0123] The term “MMP10 gene” refers to a mammalian gene encoding a Matrix Metalloproteinase 10 polypeptide. Non-limiting examples of MMP10 genes include: NCBI Gene ID: 4319 [human], NCBI Gene ID: 100146442 [equine], NCBI Gene ID: 101081247 [feline], as well as synonymous and non-synonymous sequence variants thereof. Non-limiting examples of gene products encoded by an MMP10 gene include: UniProt: P09238; NP_002416.1 [human], XP_005614947.1 [equine], XP_003992355.2 [feline], as well as sequence variants, isoforms encoded by alternative splicing, and various glycoforms thereof. Canonically, the protein encoded by this gene belongs to the broader family of zinc-dependent enzymes that cleave components of the extracellular matrix. MMP10 is an enzyme that degrades fibronectin, and type I, III, IV, and V gelatins. In some instances, and merely for the sake of disambiguation, a prefix is added when referring to the protein or gene of a particular species (with h, c, e, and f referring to the human, canine, equine, and feline forms, respectively).

[0124] The term “MMP12 gene” refers to a mammalian gene encoding a Matrix Metalloproteinase 12 polypeptide. Non-limiting examples of MMP12 genes include: NCBI Gene ID: 4321 [human], NCBI Gene ID: 611789 [canine], NCBI Gene ID: 100069047 [equine], NCBI Gene ID: 101084472 [feline], as well as synonymous and non-synonymous sequence variants thereof. Non-limiting examples of gene products encoded by an MMP12 gene include: UniProt: P39900; NP_002417.2 [human], NP_001274067.1 [canine], XP_001498924.2 [equine], XP_003992366.2 [feline], as well as sequence variants, isoforms encoded by alternative splicing, and various glycoforms thereof. Canonically, the protein encoded by this gene belongs to the broader family of zinc-dependent enzymes that cleave components of the extracellular matrix. MMP12 is an enzyme with significant elastolytic activity and may be involved in tissue injury and remodeling. In some instances, and merely for the sake of disambiguation, a prefix is added when referring to the protein or gene of a particular species (with h, c, e, and f, referring to the human, canine, equine, and feline forms, respectively).

[0125] The term “MMP13 gene” refers to a mammalian gene encoding a Matrix Metalloproteinase 13 polypeptide. Non-limiting examples of MMP13 genes include: NCBI Gene ID: 4322 [human], NCBI Gene ID: 403763 [canine], NCBI Gene ID: 100009711 [equine], NCBI Gene ID: 493679 [feline], as well as synonymous and non-synonymous sequence variants thereof. Non-limiting examples of gene products encoded by an MMP13 gene include: UniProt: P45452; NP_002418.1 [human], XP_038521017.1 [canine], NP_001075273.1 [equine], XP_023094811.2 [feline], as well as sequence variants, isoforms encoded by alternative splicing, and various glycoforms thereof. Canonically, the protein encoded by this gene belongs to the broader family of zinc-dependent enzymes that cleave components of the extracellular matrix. MMP13 is an enzyme that degrades various types of collagen and has been implicated in wound healing, tissue remodeling, cartilage degradation, bone development, bone mineralization and ossification. In some instances, and merely for the sake of disambiguation, a prefix is added when referring to the protein or gene of a particular species (with h, c, e, and f, referring to the human, canine, equine, and feline forms, respectively).

[0126] The term “TIMP1 gene” refers to a mammalian gene encoding a TIMP Metallopeptidase Inhibitor 1 polypeptide. Non-limiting examples of TIMP1 genes include: NCBI Gene ID: 7076 [human], NCBI Gene ID: 403816 [canine], NCBI Gene ID: 100034220 [equine], NCBI Gene ID: 101095886 [feline], as well as synonymous and non-synonymous sequence variants thereof. Non-limiting examples of gene products encoded by a TIMP1 gene include: UniProt: P01033; NP_003245.1 [human], NP_001003182.1 [canine], XP_023488949.1 [equine], XP_023105059.1 [feline], as well as sequence variants, isoforms encoded by alternative splicing, and various glycoforms thereof. Canonically, the protein encoded by this gene functions by forming one to one complexes with target metalloproteinases, such as collagenases, irreversibly inactivating through binding to their catalytic zinc cofactor. TIMP1 acts on MMP1, MMP2, MMP3, MMP7, MMP8, MMP9, MMP10, MMP11, MMP12, MMP13 and MMP16, but not on MMP14 and has been shown to act as a growth factor regulating cell differentiation, migration and cell death. In some instances, and merely for the sake of disambiguation, a prefix is added when referring to the protein or gene of a particular species (with h, c, e, and f referring to the human, canine, equine, and feline forms, respectively).

[0127] The term “TIMP3 gene” refers to a mammalian gene encoding a TIMP Metallopeptidase Inhibitor 3 polypeptide. Non-limiting examples of TIMP3 genes include: NCBI Gene ID: 7078 [human], NCBI Gene ID: 481289 [canine], NCBI Gene ID: 100033947 [equine], NCBI Gene ID: 101091215 [feline], as well as synonymous and non-synonymous sequence variants thereof. Non-limiting examples of gene products encoded by a TIMP3 gene include: UniProt: P35625; NP_000353.1 [human], NP_001271368.1 [canine], NP_001075339.1 [equine], XP_003989265.1 [feline], as well as sequence variants, isoforms encoded by alternative splicing, and various glycoforms thereof. Canonically, the protein encoded by this gene complexes with metalloproteinases (such as collagenases) to irreversibly inactivate them by binding to their catalytic zinc cofactor. TIMP3 is known to act on MMP1, MMP2, MMP3, MMP7, MMP9, MMP13, MMP14 and MMP15. In some instances, and merely for the sake of disambiguation, a prefix is added when referring to the protein or gene of a particular species (with h, c, e, and f referring to the human, canine, equine, and feline forms, respectively).

[0128] The term “CXCL1 gene” refers to a mammalian gene encoding a C—X—C Motif Chemokine Ligand 1 polypeptide. Non-limiting examples of CXCL1 genes include: NCBI Gene ID: 2919 [human], NCBI Gene ID: 100034121 [equine], NCBI Gene ID: 102901432 [feline], as well as synonymous and non-synonymous sequence variants thereof. Non-limiting examples of gene products encoded by a CXCL1 gene include: UniProt: P09341; NP_001502.1 [human], NP_001296409.1 [equine], XP_023108817.2 [feline], as well as sequence variants, isoforms encoded by alternative splicing, and various glycoforms thereof. Canonically, the protein encoded by this gene has chemotactic activity for neutrophils and may play a role inflammation. In some instances, and merely for the sake of disambiguation, a prefix is added when referring to the protein or gene of a particular species (with h, c, e, and f referring to the human, canine, equine, and feline forms, respectively).

[0129] The term “CXCL2 gene” refers to a mammalian gene encoding a C—X—C Motif Chemokine Ligand 2 polypeptide. Non-limiting examples of CXCL2 genes include: NCBI Gene ID: 2920 [human], NCBI Gene ID: 100233237 [equine], as well as synonymous and non-synonymous sequence variants thereof. Non-limiting examples of gene products encoded by a CXCL2 gene include: UniProt: P19875, Q9UPB8; NP_002080.1 [human], NP_001137427.1 [equine], as well as sequence variants, isoforms encoded by alternative splicing, and various glycoforms thereof. Canonically, the protein encoded by this gene has antimicrobial function via its regulation of inflammatory and immunoregulatory processes. CXCL2 is expressed at the site of inflammation and has been shown to suppress proliferation of hematopoietic progenitor cells. In some instances, and merely for the sake of disambiguation, a prefix is added when referring to the protein or gene of a particular species (with h, c, e, and f referring to the human, canine, equine, and feline forms, respectively).

[0130] The term “CXCL3 gene” refers to a mammalian gene encoding a C—X—C Motif Chemokine Ligand 3 polypeptide. Non-limiting examples of CXCL3 genes include: NCBI Gene ID: 2921 [human] NCBI Gene ID: 100056258 [equine], as well as synonymous and non-synonymous sequence variants thereof. Non-limiting examples of gene products encoded by a CXCL3 gene include: UniProt: P19876, Q4W5H9; NP_002081.2 [human], NP_001137265.1 [equine], as well as sequence variants, isoforms encoded by alternative splicing, and various glycoforms thereof. Canonically, the protein encoded by this gene is a secreted growth factor that signals through the G-protein coupled receptor, CXCR2 and plays a role in inflammation and as a chemoattractant for neutrophils. In some instances, and merely for the sake of disambiguation, a prefix is added when referring to the protein or gene of a particular species (with h, c, e, and f referring to the human, canine, equine, and feline forms, respectively).

[0131] The term “CXCL5 gene” refers to a mammalian gene encoding a C—X—C Motif Chemokine Ligand 5 polypeptide. Non-limiting examples of CXCL5 genes include: NCBI Gene ID: 6374 [human], as well as synonymous and non-synonymous sequence variants thereof. Non-limiting examples of gene products encoded by a CXCL5 gene include: UniProt: P19876, Q4W5H9; NP_002081.2 [human], UniProt: P97885 [rat], UniProt: P50228 [mouse] as well as sequence variants, isoforms encoded by alternative splicing, and various glycoforms thereof. Canonically, the protein encoded by this gene is thought to interact with the G-protein coupled receptor, CXCR2 to promote angiogenesis, remodel connective tissues and recruit neutrophils. In some instances, and merely for the sake of disambiguation, a prefix is added when referring to the protein or gene of a particular species (with h, c, e, and f referring to the human, canine, equine, and feline forms, respectively).

[0132] The term “CXCL6 gene” refers to a mammalian gene encoding a C—X—C Motif Chemokine Ligand 6 polypeptide. Non-limiting examples of CXCL6 genes include: NCBI Gene ID: 6372 [human], NCBI Gene ID: 106557449 [canine], NCBI Gene ID: 100033988 [equine], NCBI Gene ID: 101094593 [feline], as well as synonymous and non-synonymous sequence variants thereof. Non-limiting examples of gene products encoded by a CXCL6 gene include: UniProt: P80162; NP_002984.1 [human], XP_038541813.1 [canine], NP_001075355.2 [equine], XP_003985379.3 [feline] as well as sequence variants, isoforms encoded by alternative splicing, and various glycoforms thereof. Canonically, the protein encoded by this gene is a chemotactic factor for neutrophils and exhibits antibacterial activity. In some instances, and merely for the sake of disambiguation, a prefix is added when referring to the protein or gene of a particular species (with h, c, e, and f, referring to the human, canine, equine, and feline forms, respectively).

[0133] The term “CXCL8 gene” refers to a mammalian gene encoding a C—X—C Motif Chemokine Ligand 8 polypeptide. Non-limiting examples of CXCL8 genes include: NCBI Gene ID: 3576 [human], NCBI Gene ID: 403850 [canine], NCBI Gene ID: 100037400 [equine], NCBI Gene ID: 493836 [feline], as well as synonymous and non-synonymous sequence variants thereof. Non-limiting examples of gene products encoded by a CXCL8 gene include: UniProt: P10145; NP_000575.1 [human], NP_001003200.1 [canine], NP_001077420.2 [equine], NP_001009281.1 [feline], as well as sequence variants, isoforms encoded by alternative splicing, and various glycoforms thereof. Canonically, the protein encoded by this gene is secreted by mononuclear macrophages, neutrophils, eosinophils, T lymphocytes, epithelial cells, and fibroblasts and functions as a chemotactic factor that guides neutrophils to the site of infection. CXCL8 also participates with other cytokines in the proinflammatory signaling cascade. In some instances, and merely for the sake of disambiguation, a prefix is added when referring to the protein or gene of a particular species (with h, c, e, and f, referring to the human, canine, equine, and feline forms, respectively).

[0134] The term “CCL2 gene” refers to a mammalian gene encoding a C—C Motif Chemokine Ligand 2″ polypeptide. Non-limiting examples of CCL2 genes include: NCBI Gene ID: 6347 [human], NCBI Gene ID: 403981 [canine], NCBI Gene ID: 100034136 [equine], NCBI Gene ID: 100127112 [feline], as well as synonymous and non-synonymous sequence variants thereof. Non-limiting examples of gene products encoded by a CCL2 gene include: UniProt: P13500; NP_002973.1 [human], NP_001003297.1 [canine], NP_001075400.1 [equine], XP_003996605.1 [feline], as well as sequence variants, isoforms encoded by alternative splicing, and various glycoforms thereof. Canonically, the protein encoded by this gene acts as a ligand for CCR2, which induces chemotactic activity for monocytes and basophils (but not neutrophils or eosinophils). In some instances, and merely for the sake of disambiguation, a prefix is added when referring to the protein or gene of a particular species (with h, c, e, and f, referring to the human, canine, equine, and feline forms, respectively).

[0135] The term “CCL3 gene” refers to a mammalian gene encoding a C—C Motif Chemokine Ligand 3 polypeptide. Non-limiting examples of CCL3 genes include: NCBI Gene ID: 6348 [human], NCBI Gene ID: 448787 [canine], NCBI Gene ID: 100057909 [equine], NCBI Gene ID: 100302540 [feline], as well as synonymous and non-synonymous sequence variants thereof. Non-limiting examples of gene products encoded by a CCL3 gene include: UniProt: P10147; NP_002974.1 [human], NP_001005251.2 [canine], NP_001108413.1 [equine], NP_001157129.1 [feline], as well as sequence variants, isoforms encoded by alternative splicing, and various glycoforms thereof. Canonically, the protein encoded by this gene plays a role in inflammatory responses through binding to the receptors CCR1, CCR4 and CCR5. In some instances, and merely for the sake of disambiguation, a prefix is added when referring to the protein or gene of a particular species (with h, c, e, and f referring to the human, canine, equine, and feline forms, respectively).

[0136] The term “CCL5 gene” refers to a mammalian gene encoding a C—C Motif Chemokine Ligand 5 polypeptide. Non-limiting examples of CCL5 genes include: NCBI Gene ID: 6352 [human], NCBI Gene ID: 403522 [canine], NCBI Gene ID: 100033925 [equine], NCBI Gene ID: 493689 [feline], as well as synonymous and non-synonymous sequence variants thereof. Non-limiting examples of gene products encoded by a CCL5 gene include: UniProt: P13501; NP_001265665.1 [human], NP_001003010.1 [canine], NP_001075332.1 [equine], NP_001009827.1 [feline]) as well as sequence variants, isoforms encoded by alternative splicing, and various glycoforms thereof. Canonically, the protein encoded by this gene functions as a chemoattractant for blood monocytes, memory T helper cells and eosinophils, induces the release of histamine from basophils, and activates eosinophils. In some instances, and merely for the sake of disambiguation, a prefix is added when referring to the protein or gene of a particular species (with h, c, e, and f, referring to the human, canine, equine, and feline forms, respectively).

[0137] The term “CCL7 gene” refers to a mammalian gene encoding a C—C Motif Chemokine Ligand 7 polypeptide. Non-limiting examples of CCL7 genes include: NCBI Gene ID: 6354 [human], NCBI Gene ID: 491148 [canine], NCBI Gene ID: 100071714 [equine], NCBI Gene ID: 101096931 [feline], as well as synonymous and non-synonymous sequence variants thereof. Non-limiting examples of gene products encoded by a CCL7 gene include: UniProt: P80098; NP_006264.2 [human], NP_001010960.1 [canine], XP_005597638.1 [equine], XP_044900774.1 [feline], as well as sequence variants, isoforms encoded by alternative splicing, and various glycoforms thereof. Canonically, the protein encoded by this gene is a secreted chemokine which attracts macrophages during inflammation and metastasis and is an in vivo substrate of MMP2. In some instances, and merely for the sake of disambiguation, a prefix is added when referring to the protein or gene of a particular species (with h, c, e, and f, referring to the human, canine, equine, and feline forms, respectively).

[0138] The term “CCL20 gene” refers to a mammalian gene encoding a C—C Motif Chemokine Ligand 20 polypeptide. Non-limiting examples of CCL20 genes include: NCBI Gene ID: 6364 [human], NCBI Gene ID: 448790 [canine], NCBI Gene ID: 100629808 [equine], NCBI Gene ID: 101089032 [feline], as well as synonymous and non-synonymous sequence variants thereof. Non-limiting examples of gene products encoded by a CCL20 gene include: UniProt: P78556; NP_001123518.1 [human], NP_001005254.1 [canine], XP_003365179.2 [equine], XP_003991274.2 [feline], as well as sequence variants, isoforms encoded by alternative splicing, and various glycoforms thereof. Canonically, the protein encoded by this gene is involved in inflammatory processes and displays chemotactic activity for lymphocytes. In some instances, and merely for the sake of disambiguation, a prefix is added when referring to the protein or gene of a particular species (with h, c, e, and f, referring to the human, canine, equine, and feline forms, respectively).

[0139] The term “CXCR1 gene” refers to a mammalian gene encoding a C—X—C Motif Chemokine Receptor 1 polypeptide. Non-limiting examples of CXCR1 genes include: NCBI Gene ID: 3577 [human], NCBI Gene ID: 478906 [canine], NCBI Gene ID: 100058291 [equine], NCBI Gene ID: 101085650 [feline], as well as synonymous and non-synonymous sequence variants thereof. Non-limiting examples of gene products encoded by a CXCR1 gene include: UniProt: P25024; NP_000625.1 [human], XP_038303849.1 [canine], XP_001491062.1 [equine], XP_011283865.1 [feline], as well as sequence variants, isoforms encoded by alternative splicing, and various glycoforms thereof. Canonically, the protein encoded by this gene is a receptor for IL8 and transduces signaling to mediate neutrophil migration to sites of inflammation, among other activities. In some instances, and merely for the sake of disambiguation, a prefix is added when referring to the protein or gene of a particular species (with h, c, e, and f, referring to the human, canine, equine, and feline forms, respectively).

[0140] The term “CXCR2 gene” refers to a mammalian gene encoding a C—X—C Motif Chemokine Receptor 2 polypeptide. Non-limiting examples of CXCR2 genes include: NCBI Gene ID: 3579 [human], NCBI Gene ID: 478905 [canine], NCBI Gene ID: 100055552 [equine], NCBI Gene ID: 101085396 [feline], as well as synonymous and non-synonymous sequence variants thereof. Non-limiting examples of gene products encoded by a CXCR2 gene include: e.g., UniProt: P25025; NP_001161770.1 [human], NP_001003151.2 [canine], XP_005610662.1 [equine], XP_044890398.1 [feline], as well as sequence variants, isoforms encoded by alternative splicing, and various glycoforms thereof. Canonically, the protein encoded by this gene is a receptor for IL8 and transduces signaling to mediate neutrophil migration to sites of inflammation, among other activities. In some instances, and merely for the sake of disambiguation, a prefix is added when referring to the protein or gene of a particular species (with h, c, e, and f, referring to the human, canine, equine, and feline forms, respectively).

[0141] The term “CCR7 gene” refers to a mammalian gene encoding a C—C Motif Chemokine Receptor 7 polypeptide. Non-limiting examples of CCR7 genes include: NCBI Gene ID: 1236 [human], NCBI Gene ID: 491011 [canine], NCBI Gene ID: 100067673 [equine], NCBI Gene ID: 101084327 [feline], as well as synonymous and non-synonymous sequence variants thereof. Non-limiting examples of gene products encoded by a CCR7 gene include: UniProt: P32248; NP_001288643.1 [human], XP_038403305.1 [canine], XP_001500231.1 [equine], XP_003996882.1 [feline], as well as sequence variants, isoforms encoded by alternative splicing, and various glycoforms thereof. Canonically, the protein encoded by this gene controls the migration of memory T cells to inflamed tissues, as well as stimulate dendritic cell maturation. Signals mediated by this receptor may also function in chronic inflammation pathogenesis. In some instances, and merely for the sake of disambiguation, a prefix is added when referring to the protein or gene of a particular species (with h, c, e, and f, referring to the human, canine, equine, and feline forms, respectively).

[0142] The term “ADAM17 gene” refers to a mammalian gene encoding an ADAM Metallopeptidase Domain 17 polypeptide. Non-limiting examples of ADAM17 genes include: NCBI Gene ID: 6868 [human], NCBI Gene ID: 475662 [canine], NCBI Gene ID: 100072496 [equine], NCBI Gene ID: 101089004 [feline], as well as synonymous and non-synonymous sequence variants thereof. Non-limiting examples of gene products encoded by a ADAM17 gene include: UniProt: P78536; NP_001369706.1 [human], NP 001273795.1 [canine], NP_001295481.1 [equine], XP_003984558.1 [feline], as well as sequence variants, isoforms encoded by alternative splicing, and various glycoforms thereof. Canonically, the protein encoded by these genes is proteolytically processed to generate a mature protease, which functions by shedding the ectodomain of tumor necrosis factor-alpha, thereby releasing soluble tumor necrosis factor-alpha from its membrane-bound precursor. In some instances, and merely for the sake of disambiguation, a prefix is added when referring to the protein or gene of a particular species (with h, c, e, and f referring to the human, canine, equine, and feline forms, respectively).

[0143] The term “TNF gene” refers to a mammalian gene encoding a Tumor Necrosis Factor polypeptide. Non-limiting examples of TNF genes include: NCBI Gene ID: 7124 [human], NCBI Gene ID: 403922 [canine], NCBI Gene ID: 100033834 [equine], NCBI Gene ID: 493755 [feline], as well as synonymous and non-synonymous sequence variants thereof. Non-limiting examples of gene products encoded by a TNF gene include: UniProt: P01375; NP_000585.2 [human], NP_001003244.4 [canine], NP_001075288.2 [equine], NP_001009835.1 [feline], as well as sequence variants, isoforms encoded by alternative splicing, and various glycoforms thereof. Canonically, the protein encoded by these genes is a multifunctional proinflammatory cytokine that is mainly secreted by macrophages and can bind (and therefore function through) its receptors TNFRSF1A and TNFRSF1B. In some instances, and merely for the sake of disambiguation, a prefix is added when referring to the protein or gene of a particular species (with h, c, e, and f referring to the human, canine, equine, and feline forms, respectively).

[0144] The term “TNFRSF1A gene” refers to a mammalian gene encoding a Tumor Necrosis Factor Receptor 1 polypeptide. Non-limiting examples of TNFRSF1A genes include: NCBI Gene ID: 7132 [human], NCBI Gene ID: 403634 [canine], NCBI Gene ID: 100059548 [equine], NCBI Gene ID: 493957 [feline], as well as synonymous and non-synonymous sequence variants thereof. Non-limiting examples of gene products encoded by a TNFRSF1A gene include: UniProt: P19438; NP_001056.1 [human], XP_038295153.1 [canine], XP_023498787.1 [equine], NP_001009361.1 [feline], as well as sequence variants, isoforms encoded by alternative splicing, and various glycoforms thereof. Canonically, the proteins encoded by the genes listed above are transmembrane receptor proteins capable of binding Tumor Necrosis Factor Alpha (TNFA) or lymphotoxin alpha (LTA), its principal ligand. Upon binding to TNFA, the receptor trimerizes and is activated, transmitting intracellular signaling cascades with role in various processes, including apoptosis and inflammation. See generally, Ward-Kavanagh, L. K., et al. (2016). Immunity, 44(5), 1005-1019. In some instances, and merely for the sake of disambiguation, a prefix is added when referring to the protein or gene of a particular species (with h, c, e, and f referring to the human, canine, equine, and feline forms, respectively).

[0145] The term “TNFRSF1B gene” refers to a mammalian gene encoding a Tumor Necrosis Factor Receptor 2 polypeptide. Non-limiting examples of TNFRSF1B genes include: NCBI Gene ID: 7133 [human], NCBI Gene ID: 487437 [canine], NCBI Gene ID: 100055840 [equine], NCBI Gene ID: 101080392 [feline], as well as synonymous and non-synonymous sequence variants thereof. Non-limiting examples of gene products encoded by a TNFRSF1B gene include: UniProt: P20333; XP_011540362.1 [human], XP_038387905.1 [canine], XP_023491528.1 [equine], XP_023113905.2 [feline], as well as sequence variants, isoforms encoded by alternative splicing, and various glycoforms thereof. Canonically, the proteins encoded by the genes listed above are transmembrane receptor proteins capable of binding TNFA or LTA and are implicated in pro-survival pathways through downstream activation of NFkB pathway. See generally, Ward-Kavanagh, L. K., et al. (2016). Immunity. 44(5), 1005-1019. In some instances, and merely for the sake of disambiguation, a prefix is added when referring to the protein or gene of a particular species (with h, c, e, and f, referring to the human, canine, equine, and feline forms, respectively).

[0146] The term “IL4 gene” refers to a mammalian gene encoding an Interleukin 4 polypeptide. Non-limiting examples of IL4 genes include: NCBI Gene ID: 3565 [human], NCBI Gene ID: 403785 [canine], NCBI Gene ID: 100034225 [equine], NCBI Gene ID: 751514 [feline], as well as synonymous and non-synonymous sequence variants thereof. Non-limiting examples of gene products encoded by a IL4 gene include: UniProt: P05112; NP_000580.1 [human], NP 001003159.1 [canine], NP_001075988.1 [equine], NP_001036804.1 [feline], as well as sequence variants, isoforms encoded by alternative splicing, and various glycoforms thereof. Canonically, the protein encoded by these genes is a pleiotropic cytokine produced by activated T cells and is considered an important cytokine for tissue repair, counterbalancing the effects of proinflammatory type 1 cytokines, though it also promotes allergic airway inflammation and mediates acute inflammation, among other activities. In some instances, and merely for the sake of disambiguation, a prefix is added when referring to the protein or gene of a particular species (with h, c, e, and f, referring to the human, canine, equine, and feline forms, respectively).

[0147] The term “IL4R gene” refers to a mammalian gene encoding an Interleukin 4 Receptor polypeptide. Non-limiting examples of IL4R genes include: NCBI Gene ID: 3566 [human], NCBI Gene ID: 489957 [canine], NCBI Gene ID: 791252 [equine], NCBI Gene ID: 101096277 [feline], as well as synonymous and non-synonymous sequence variants thereof. Non-limiting examples of gene products encoded by a IL4R gene include: UniProt: P24394; NP_000409.1 [human], NP_001003159.1 [canine], XP_005598791.2 [equine], XP_023102076.2 [feline], as well as sequence variants, isoforms encoded by alternative splicing, and various glycoforms thereof. Canonically, the protein encoded by these genes is a type I transmembrane protein that can bind interleukin 4 and interleukin 13 to regulate IgE production and promote differentiation of Th2 cells, among other activities. In some instances, and merely for the sake of disambiguation, a prefix is added when referring to the protein or gene of a particular species (with h, c, e, and f referring to the human, canine, equine, and feline forms, respectively).

[0148] The term “IL6 gene” refers to a mammalian gene encoding an Interleukin 6 polypeptide. Non-limiting examples of IL6 genes include: NCBI Gene ID: 3569 [human], NCBI Gene ID: 403985 [canine], NCBI Gene ID: 100034196 [equine], NCBI Gene ID: 493687 [feline], as well as synonymous and non-synonymous sequence variants thereof. Non-limiting examples of gene products encoded by a IL6 gene include: UniProt: P05231; NP_000591.1 [human], NP_001003301.1 [canine], NP_001075965.2 [equine], NP_001009211.2 [feline], as well as sequence variants, isoforms encoded by alternative splicing, and various glycoforms thereof. Canonically, the protein encoded by these genes is a cytokine that functions in inflammation and the maturation of B cells that is primarily produced at sites of acute and chronic inflammation, where it is secreted into the serum and induces a transcriptional inflammatory response through interleukin 6 receptor. In some instances, and merely for the sake of disambiguation, a prefix is added when referring to the protein or gene of a particular species (with h, c, e, and f referring to the human, canine, equine, and feline forms, respectively).

[0149] The term “IL6R gene” refers to a mammalian gene encoding an Interleukin-6 Receptor polypeptide. Non-limiting examples of IL6R genes include: NCBI Gene ID: 3560 [human], NCBI Gene ID: 612271 [canine], NCBI Gene ID: 102148787 [equine], NCBI Gene ID: 101085689 [feline], as well as synonymous and non-synonymous sequence variants thereof. Non-limiting examples of gene products encoded by a IL6R gene include: UniProt: P08887; CAA41231.1 [human], XP_038527979.1 [canine], XP_023496854.1 [equine], XP_023103841.2 [feline], as well as sequence variants, isoforms encoded by alternative splicing, and various glycoforms thereof. Canonically, the proteins encoded by the genes listed above are transmembrane proteins capable of binding to interleukin-6, its native ligand. This binding event triggers intracellular signaling events that result in pro-inflammatory responses. See generally, Wolf, J., et al. (2014). Cytokine, 70(1), 11-20. In some instances, and merely for the sake of disambiguation, a prefix is added when referring to the protein or gene of a particular species (with h, c, e, and f referring to the human, canine, equine, and feline forms, respectively).

[0150] The term “IL6ST gene” refers to a mammalian gene encoding an Interleukin-6 Receptor polypeptide. Non-limiting examples of IL6ST genes include: NCBI Gene ID: 3572 [human], NCBI Gene ID: 403545 [canine], NCBI Gene ID: 100051700 [equine], NCBI Gene ID: 101089832 [feline], as well as synonymous and non-synonymous sequence variants thereof. Non-limiting examples of gene products encoded by a IL6ST gene include: UniProt: P40189 [human], A0A8I3QPC9 [canine], F7CFP8 [equine], M3WE28 [feline], as well as sequence variants, isoforms encoded by alternative splicing, and various glycoforms thereof. Canonically, the proteins encoded by the genes listed above are transmembrane proteins capable of binding to the interleukin-6 receptor (IL6R) when the latter is bound by its canonical interleukin-6 ligand (IL6). This binding event triggers intracellular signaling events that result in pro-inflammatory responses. See generally, Wolf, J., et al. (2014). Cytokine 70(1), 11-20. In some instances, and merely for the sake of disambiguation, a prefix is added when referring to the protein or gene of a particular species (with h, c, e, and f referring to the human, canine, equine, and feline forms, respectively).

[0151] The term “IL10 gene” refers to a mammalian gene encoding an Interleukin 10 polypeptide. Non-limiting examples of IL10 genes include: NCBI Gene ID: 3586 [human], NCBI Gene ID: 403628 [canine], NCBI Gene ID: 100034187 [equine], NCBI Gene ID: 493683 [feline], as well as synonymous and non-synonymous sequence variants thereof. Non-limiting examples of gene products encoded by a IL10 gene include: UniProt: P22301; NP_000563.1 [human], NP_001003077.1 [canine], NP_001075959.1 [equine], NP_001009209.1 [feline], as well as sequence variants, isoforms encoded by alternative splicing, and various glycoforms thereof. Canonically, the protein encoded by these genes is a pleiotropic cytokine that regulates inflammation and acts on many immune cell types through binding to its heterodimeric receptor composed of IL10RA and IL10RB, thereby activating downstream signaling cascades, such as the JAK-STAT pathway. In some instances, and merely for the sake of disambiguation, a prefix is added when referring to the protein or gene of a particular species (with h, c, e, and f referring to the human, canine, equine, and feline forms, respectively).

[0152] The term “IL10RA gene” refers to a mammalian gene encoding a Interleukin 10 Receptor Alpha polypeptide. Non-limiting examples of IL10RA genes include: NCBI Gene ID: 3587 [human], NCBI Gene ID: 610823 [canine], NCBI Gene ID: 100071172 [equine], NCBI Gene ID: 101087601 [feline], as well as synonymous and non-synonymous sequence variants thereof. Non-limiting examples of gene products encoded by a IL10RA gene include: UniProt: Q13651; NP_001549.2 [human], XP_038520677.1 [canine], XP_014596783.1 [equine], XP_003992449.1 [feline], as well as sequence variants, isoforms encoded by alternative splicing, and various glycoforms thereof. Canonically, the protein encoded by these genes is, upon forming a heterodimer with IL10RB, a regulator of pro-inflammatory signaling through the binding of its ligand IL-10. In some instances, and merely for the sake of disambiguation, a prefix is added when referring to the protein or gene of a particular species (with h, c, e, and f, referring to the human, canine, equine, and feline forms, respectively).

[0153] The term “IL10RB gene” refers to a mammalian gene encoding an Interleukin 10 Receptor Beta polypeptide. Non-limiting examples of IL10RB genes include: NCBI Gene ID: 3588 [human], NCBI Gene ID: 478404 [canine], NCBI Gene ID: 100052549 [equine], NCBI Gene ID: 101090038 [feline], as well as synonymous and non-synonymous sequence variants thereof. Non-limiting examples of gene products encoded by a IL10RB gene include: UniProt: Q08334; NP_000619.3 [human], XP_038299308.1 [canine], XP_023485821.1 [equine], XP_003991512.2 [feline], as well as sequence variants, isoforms encoded by alternative splicing, and various glycoforms thereof. Canonically, the protein encoded by these genes is, upon forming a heterodimer with IL10RA, a regulator of pro-inflammatory signaling through the binding of its ligand IL-10. In some instances, and merely for the sake of disambiguation, a prefix is added when referring to the protein or gene of a particular species (with h, c, e, and f, referring to the human, canine, equine, and feline forms, respectively).

[0154] The term “IL13 gene” refers to a mammalian gene encoding an Interleukin 13 polypeptide. Non-limiting examples of IL13 genes include: NCBI Gene ID: 3596 [human], NCBI Gene ID: 442990 [canine], NCBI Gene ID: 100034113 [equine], NCBI Gene ID: 101084678 [feline], as well as synonymous and non-synonymous sequence variants thereof. Non-limiting examples of gene products encoded by a IL13 gene include: UniProt: P35225; NP_001341920.1 [human], NP 001003384.1 [canine], NP_001137263.1 [equine], NP_001009209.1 [feline], as well as sequence variants, isoforms encoded by alternative splicing, and various glycoforms thereof. Canonically, the protein encoded by these genes regulates of the production of pro-inflammatory cytokines and chemokines. In some instances, and merely for the sake of disambiguation, a prefix is added when referring to the protein or gene of a particular species (with h, c, e, and f referring to the human, canine, equine, and feline forms, respectively).

[0155] The term “IL13RA1 gene” refers to a mammalian gene encoding an Interleukin 13 Receptor Alpha 1 polypeptide. Non-limiting examples of IL13RA1 genes include: NCBI Gene ID: 3597 [human], NCBI Gene ID: 403623 [canine], NCBI Gene ID: 100055312 [equine], NCBI Gene ID: 101091351 [feline], as well as synonymous and non-synonymous sequence variants thereof. Non-limiting examples of gene products encoded by a IL13RA1 gene include: UniProt: P78552; NP_001551.1 [human], XP_038306633.1 [canine], XP_023490026.1 [equine], XP_023104651.1 [feline], as well as sequence variants, isoforms encoded by alternative splicing, and various glycoforms thereof. Canonically, the protein encoded by these genes is a low affinity binding partner of IL13 and comprises a functional receptor once associated with of IL13RA2. Once bound to IL13, the receptor complex stimulates the production of pro-inflammatory cytokines and chemokines. In some instances, and merely for the sake of disambiguation, a prefix is added when referring to the protein or gene of a particular species (with h, c, e, and f referring to the human, canine, equine, and feline forms, respectively).

[0156] The term “IL13RA2 gene” refers to a mammalian gene encoding an Interleukin 13 Receptor Alpha 2 polypeptide. Non-limiting examples of IL13RA2 genes include: NCBI Gene ID: 3598 [human], NCBI Gene ID: 403622 [canine], NCBI Gene ID: 100057673 [equine], NCBI Gene ID: 101100114 [feline], as well as synonymous and non-synonymous sequence variants thereof. Non-limiting examples of gene products encoded by a IL13RA2 gene include: UniProt: Q14627; NP_000631.1 [human], NP_001003075.1 [canine], XP_023489189.1 [equine], XP_044906881.1 [feline], as well as sequence variants, isoforms encoded by alternative splicing, and various glycoforms thereof. Canonically, the protein encoded by these genes is a high affinity binding partner of IL13 but lacks a cytoplasmic domain. Along with IL13RA1, it forms a functional receptor that stimulates the production of pro-inflammatory cytokines and chemokines. In some instances, and merely for the sake of disambiguation, a prefix is added when referring to the protein or gene of a particular species (with h, c, e, and f referring to the human, canine, equine, and feline forms, respectively).

[0157] The term “IL17A gene” refers to a mammalian gene encoding an Interleukin 17A polypeptide. Non-limiting examples of IL17A genes include: NCBI Gene ID: 3605 [human], NCBI Gene ID: 481837 [canine], NCBI Gene ID: 100034142 [equine], NCBI Gene ID: 101095339 [feline], as well as synonymous and non-synonymous sequence variants thereof. Non-limiting examples of gene products encoded by a IL17A gene include: UniProt: Q16552; NP_002181.1 [human], NP_001159350.1 [canine], NP_001137264.1 [equine], XP_006931878.1 [feline], as well as sequence variants, isoforms encoded by alternative splicing, and various glycoforms thereof. Canonically, the protein encoded by these genes is an inflammatory cytokine that activates the NF kappa B signaling pathway through interactions with its heterodimeric receptor complex of IL17RA and IL17RC, thereby activating transcription of various chemokines, cytokines and other factors. In some instances, and merely for the sake of disambiguation, a prefix is added when referring to the protein or gene of a particular species (with h, c, e, and f referring to the human, canine, equine, and feline forms, respectively).

[0158] The term “IL17RA gene” refers to a mammalian gene encoding an Interleukin 17 Receptor A polypeptide. Non-limiting examples of IL17RA genes include: NCBI Gene ID: 23765 [human], NCBI Gene ID: 486759 [canine], NCBI Gene ID: 100055511 [equine], NCBI Gene ID: 101095588 [feline], as well as synonymous and non-synonymous sequence variants thereof. Non-limiting examples of gene products encoded by a IL17RA gene include: UniProt: Q96F46; NP_001276834.1 [human], XP_038295433.1 [canine], XP_005610881.1 [equine], XP_023112364.2 [feline], as well as sequence variants, isoforms encoded by alternative splicing, and various glycoforms thereof. Canonically, the protein encoded by these genes is a transmembrane protein that binds to IL17A with low affinity as part of a multimeric receptor complex. With its ligand, IL17RA is implicated in many inflammatory conditions. In some instances, and merely for the sake of disambiguation, a prefix is added when referring to the protein or gene of a particular species (with h, c, e, and f referring to the human, canine, equine, and feline forms, respectively).

[0159] The term “IL18 gene” refers to a mammalian gene encoding an Interleukin 18 polypeptide. Non-limiting examples of IL18 genes include: NCBI Gene ID: 3606 [human], NCBI Gene ID: 403796 [canine], NCBI Gene ID: 100034216 [equine], NCBI Gene ID: 493688 [feline], as well as synonymous and non-synonymous sequence variants thereof. Non-limiting examples of gene products encoded by a IL18 gene include: UniProt: Q14116; NP_001230140.1 [human], XP_038520002.1 [canine], XP_005611483.1 [equine], NP_001009213.2 [feline], as well as sequence variants, isoforms encoded by alternative splicing, and various glycoforms thereof. Canonically, the protein encoded by these genes is a pro-inflammatory cytokine that regulates inflammatory signaling through the NF kappa B pathway when engaged with its receptor and co-receptor, IL18R1 and IL18RAP. In some instances, and merely for the sake of disambiguation, a prefix is added when referring to the protein or gene of a particular species (with h, c, e, and f referring to the human, canine, equine, and feline forms, respectively).

[0160] The term “IL18R1 gene” refers to a mammalian gene encoding an Interleukin 18 Receptor 1 polypeptide. Non-limiting examples of IL18R1 genes include: NCBI Gene ID: 8809 [human], NCBI Gene ID: 611438 [canine], NCBI Gene ID: 100058269 [equine], NCBI Gene ID: 493938 [feline], as well as synonymous and non-synonymous sequence variants thereof. Non-limiting examples of gene products encoded by a IL18R1 gene include: UniProt: Q13478; NP_001269328.1 [human], XP_038536128.1 [canine], XP_023474273.1 [equine], NP_001009863.2 [feline], as well as sequence variants, isoforms encoded by alternative splicing, and various glycoforms thereof. Canonically, the protein encoded by these genes is an essential component for transducing IL18-mediated pro-inflammatory signaling. In some instances, and merely for the sake of disambiguation, a prefix is added when referring to the protein or gene of a particular species (with h, c, e, and f, referring to the human, canine, equine, and feline forms, respectively).

[0161] The term “IL18RAP gene” refers to a mammalian gene encoding an Interleukin 18 Receptor Accessory Protein polypeptide. Non-limiting examples of IL18RAP genes include: NCBI Gene ID: 8807 [human], NCBI Gene ID: 481327 [canine], NCBI Gene ID: 100050212 [equine], NCBI Gene ID: 101084868 [feline], as well as synonymous and non-synonymous sequence variants thereof. Non-limiting examples of gene products encoded by a IL18RAP gene include: UniProt: Q53TU5; NP_001380415.1 [human], XP_038536125.1 [canine], XP_014586460.1 [equine], XP_019682529.2 [feline], as well as sequence variants, isoforms encoded by alternative splicing, and various glycoforms thereof. Canonically, the protein encoded by these genes is an accessory protein that enhances the signal transduction of IL18-mediated pro-inflammatory signaling. In some instances, and merely for the sake of disambiguation, a prefix is added when referring to the protein or gene of a particular species (with h, c, e, and f, referring to the human, canine, equine, and feline forms, respectively).

[0162] The term “NGF gene” refers to a mammalian gene encoding a Nerve Growth Factor polypeptide. Non-limiting examples of NGF genes include: NCBI Gene ID: 4803 [human], NCBI Gene ID: 403402 [canine], NCBI Gene ID: 100065669 [equine], NCBI Gene ID: 100144611 [feline], as well as synonymous and non-synonymous sequence variants thereof. Non-limiting examples of gene products encoded by a NGF gene include: UniProt: P01138; NP_002497.2 [human], XP_038546347.1 [canine], XP_001496237.2 [equine], XP_044889256.1 [feline], as well as sequence variants, isoforms encoded by alternative splicing, and various glycoforms thereof. Canonically, this secreted protein forms a functional homodimer that is incorporated into a larger complex and has nerve growth stimulating activity. The complex is also involved in the regulation of growth and the differentiation of sympathetic and certain sensory neurons. In some instances, and merely for the sake of disambiguation, a prefix is added when referring to the protein or gene of a particular species (with h, c, e, and f, referring to the human, canine, equine, and feline forms, respectively).

[0163] The term “NGFR gene” refers to a mammalian gene encoding a Nerve Growth Factor Recepto polypeptide. Non-limiting examples of NGFR genes include: NCBI Gene ID: 4804 [human], NCBI Gene ID: 491071 [canine], NCBI Gene ID: 100069694 [equine], NCBI Gene ID: 101101519 [feline], as well as synonymous and non-synonymous sequence variants thereof. Non-limiting examples of gene products encoded by a NGFR gene include: UniProt: P08138; NP_002498.1 [human], XP_038531049.1 [canine], XP_023508464.1 [equine], XP_023099534.1 [feline], as well as sequence variants, isoforms encoded by alternative splicing, and various glycoforms thereof. Canonically, the protein encoded by these genes contains four 40-amino acid repeats within its extracellular domain with 6 cysteine residues at conserved positions followed by a serine/threonine-rich region. This cysteine-rich region contains the nerve growth factor binding domain and allows for signal transduction once bound. In some instances, and merely for the sake of disambiguation, a prefix is added when referring to the protein or gene of a particular species (with h, c, e, and f, referring to the human, canine, equine, and feline forms, respectively).

[0164] The term “NTF3 gene” refers to a mammalian gene encoding a Neurotrophin-3 polypeptide. Non-limiting examples of NTF3 genes include: NCBI Gene ID: 4908 [human], NCBI Gene ID: 493963 [canine], NCBI Gene ID: 100051839 [equine], NCBI Gene ID: 486731 [feline], as well as synonymous and non-synonymous sequence variants thereof. Non-limiting examples of gene products encoded by a NTF3 gene include: UniProt: P20783; NP_001096124.1 [human], XP_038293846.1 [canine], XP_023498780.1 [equine], NP_001009367.1 [feline], as well as sequence variants, isoforms encoded by alternative splicing, and various glycoforms thereof. Canonically, the protein encoded by these genes controls survival and differentiation of neurons. In some instances, and merely for the sake of disambiguation, a prefix is added when referring to the protein or gene of a particular species (with h, c, e, and f, referring to the human, canine, equine, and feline forms, respectively).

[0165] The term “NTF4 gene” refers to a mammalian gene encoding a Neurotrophin-4 polypeptide. Non-limiting examples of NTF4 genes include: NCBI Gene ID: 4909 [human], NCBI Gene ID: 611987 [canine], NCBI Gene ID: 100054859 [equine], NCBI Gene ID: 101100428 [feline], as well as synonymous and non-synonymous sequence variants thereof. Non-limiting examples of gene products encoded by a NTF4 gene include: UniProt: P34130; NP_001382418.1 [human], NP 001177358.2 [canine], XP_023505846.1 [equine], XP_023101354.2 [feline], as well as sequence variants, isoforms encoded by alternative splicing, and various glycoforms thereof. Canonically, the protein encoded by these genes is proteolytically processed to a mature form, which can promote survival of neurons through binding of its cognate receptor. Dysregulation of this protein is observed in various neurological disorders. In some instances, and merely for the sake of disambiguation, a prefix is added when referring to the protein or gene of a particular species (with h, c, e, and f, referring to the human, canine, equine, and feline forms, respectively).

[0166] The term “NTRK1 gene” refers to a mammalian gene encoding a Neurotrophic Receptor Tyrosine Kinase 1 polypeptide. Non-limiting examples of NTRK1 genes include: NCBI Gene ID: 4914 [human], NCBI Gene ID: 490404 [canine], NCBI Gene ID: 100064594 [equine], NCBI Gene ID: 101081603 [feline], as well as synonymous and non-synonymous sequence variants thereof. Non-limiting examples of gene products encoded by a NTRK11 gene include: UniProt: P04629; NP_001007793.1 [human], XP_038527745.1 [canine], XP_023496742.1 [equine], XP_023103311.1 [feline], as well as sequence variants, isoforms encoded by alternative splicing, and various glycoforms thereof. Canonically, the protein encoded by these genes is a membrane-bound receptor that binds neutrophin and signals through the MAPK pathway to regulate cell differentiation, among other functions. In some instances, and merely for the sake of disambiguation, a prefix is added when referring to the protein or gene of a particular species (with h, c, e, and f, referring to the human, canine, equine, and feline forms, respectively).

[0167] The term “NTRK2 gene” refers to a mammalian gene encoding a Neurotrophic Receptor Tyrosine Kinase 2 polypeptide. Non-limiting examples of NTRK2 genes include: NCBI Gene ID: 4915 [human], NCBI Gene ID: 484147 [canine], NCBI Gene ID: 100061700 [equine], NCBI Gene ID: 101101347 [feline], as well as synonymous and non-synonymous sequence variants thereof. Non-limiting examples of gene products encoded by a NTRK2 gene include: UniProt: Q16620; NP_001007098.1 [human], XP_038510982.1 [canine], XP_023482906.1 [equine], XP_023097987.1 [feline], as well as sequence variants, isoforms encoded by alternative splicing, and various glycoforms thereof. Canonically, the protein encoded by these genes is a membrane-bound receptor that binds neutrophin and signals through the MAPK pathway to regulate cell differentiation, among other functions. In some instances, and merely for the sake of disambiguation, a prefix is added when referring to the protein or gene of a particular species (with h, c, e, and f referring to the human, canine, equine, and feline forms, respectively).

[0168] The term “BDNF gene” refers to a mammalian gene encoding a Brain-Derived Neurotrophic Factor polypeptide. Non-limiting examples of BDNF genes include: NCBI Gene ID: 627 [human], NCBI Gene ID: 403461 [canine], NCBI Gene ID: 100009689 [equine], NCBI Gene ID: 493690 [feline], as well as synonymous and non-synonymous sequence variants thereof. Non-limiting examples of gene products encoded by a BDNF gene include: UniProt: P23560; NP_001137277.1 [human], NP_001002975.1 [canine], NP_001075256.1 [equine], NP_001009828.1 [feline], as well as sequence variants, isoforms encoded by alternative splicing, and various glycoforms thereof. Canonically, the protein encoded by these genes is proteolytically processed to a mature form, which can promote survival of neurons through binding of its cognate receptor. Dysregulation of this protein is observed in various neurological disorders. In some instances, and merely for the sake of disambiguation, a prefix is added when referring to the protein or gene of a particular species (with h, c, e, and f, referring to the human, canine, equine, and feline forms, respectively).

[0169] The term “SCN1A gene” refers to a mammalian gene encoding a Sodium Voltage-Gated Channel Alpha 1 polypeptide. Non-limiting examples of SCN1A genes include: NCBI Gene ID: 6323 [human], NCBI Gene ID: 478775 [canine], NCBI Gene ID: 100052059 [equine], NCBI Gene ID: 101081823 [feline], as well as synonymous and non-synonymous sequence variants thereof. Non-limiting examples of gene products encoded by a SCN1A gene include: UniProt: P35498; NP_001159435.1 [human], XP_038302870.1 [canine], XP_023478839.1 [equine], XP_019693764.1 [feline], as well as sequence variants, isoforms encoded by alternative splicing, and various glycoforms thereof. Canonically, the protein encoded by these genes mediates the voltage-dependent sodium ion permeability of excitable membranes and is involved in sensory perception of mechanical pain (i.e., activation in somatosensory neurons has been shown to induce pain without neurogenic inflammation). In some instances, and merely for the sake of disambiguation, a prefix is added when referring to the protein or gene of a particular species (with h, c, e, and f, referring to the human, canine, equine, and feline forms, respectively).

[0170] The term “SCN2A gene” refers to a mammalian gene encoding a Sodium Voltage-Gated Channel Alpha 2 polypeptide. Non-limiting examples of SCN2A genes include: NCBI Gene ID: 6326 [human], NCBI Gene ID: 478773 [canine], NCBI Gene ID: 100051816 [equine], NCBI Gene ID: 101080472 [feline], as well as synonymous and non-synonymous sequence variants thereof. Non-limiting examples of gene products encoded by a SCN2A gene include: UniProt: Q99250; NP_001035232.1 [human], XP_038302857.1 [canine], XP_023478830.1 [equine], XP_023115179.1 [feline], as well as sequence variants, isoforms encoded by alternative splicing, and various glycoforms thereof. Canonically, the protein encoded by these genes mediates the voltage-dependent sodium ion permeability of excitable membranes. In some instances, and merely for the sake of disambiguation, a prefix is added when referring to the protein or gene of a particular species (with h, c, e, and f referring to the human, canine, equine, and feline forms, respectively).

[0171] The term “SCN3A gene” refers to a mammalian gene encoding a Sodium Voltage-Gated Channel Alpha 3 polypeptide. Non-limiting examples of SCN3A genes include: NCBI Gene ID: 6328 [human], NCBI Gene ID: 478772 [canine], NCBI Gene ID: 100061941 [equine], NCBI Gene ID: 101082587 [feline], as well as synonymous and non-synonymous sequence variants thereof. Non-limiting examples of gene products encoded by a SCN3A gene include: UniProt: Q9NY46; NP_001075145.1 [human], XP_038302852.1 [canine], XP_023478823.1 [equine], XP_019693750.1 [feline], as well as sequence variants, isoforms encoded by alternative splicing, and various glycoforms thereof. Canonically, the protein encoded by these genes is a subunit of voltage-gated sodium channels and is responsible for propagation of action potentials in neurons and muscle tissue. In some instances, and merely for the sake of disambiguation, a prefix is added when referring to the protein or gene of a particular species (with h, c, e, and f, referring to the human, canine, equine, and feline forms, respectively).

[0172] The term “SCN4A gene” refers to a mammalian gene encoding a Sodium Voltage-Gated Channel Alpha 4 polypeptide. Non-limiting examples of SCN4A genes include: NCBI Gene ID: 6328 [human], NCBI Gene ID: 119873250 [canine], NCBI Gene ID: 100049793 [equine], NCBI Gene ID: 101098669 [feline], as well as synonymous and non-synonymous sequence variants thereof. Non-limiting examples of gene products encoded by a SCN4A gene include: UniProt: Q9NY46; NP_001075145.1 [human], XP_038531923.1 [canine], NP_001075230.2 [equine], XP_006940553.1 [feline], as well as sequence variants, isoforms encoded by alternative splicing, and various glycoforms thereof. Canonically, the protein encoded by these genes is a subunit of voltage-gated sodium channels and is responsible for propagation of action potentials in neurons and muscle tissue. In some instances, and merely for the sake of disambiguation, a prefix is added when referring to the protein or gene of a particular species (with h, c, e, and f, referring to the human, canine, equine, and feline forms, respectively).

[0173] The term “SCN5A gene” refers to a mammalian gene encoding a Sodium Voltage-Gated Channel Alpha 5 polypeptide. Non-limiting examples of SCN5A genes include: NCBI Gene ID: 6331 [human], NCBI Gene ID: 403497 [canine], NCBI Gene ID: 100034027 [equine], NCBI Gene ID: 101100994 [feline], as well as synonymous and non-synonymous sequence variants thereof. Non-limiting examples of gene products encoded by a SCN5A gene include: UniProt: Q14524; NP_000326.2 [human], NP_001002994.1 [canine], NP_001157367.1 [equine], XP_044893792.1 [feline], as well as sequence variants, isoforms encoded by alternative splicing, and various glycoforms thereof. Canonically, the protein encoded by these genes is a subunit of voltage-gated sodium channels and is found primarily in cardiac muscle and is responsible for the initial upstroke of the action potential in an electrocardiogram. In some instances, and merely for the sake of disambiguation, a prefix is added when referring to the protein or gene of a particular species (with h, c, e, and f, referring to the human, canine, equine, and feline forms, respectively).

[0174] The term “SCN8A gene” refers to a mammalian gene encoding a Sodium Voltage-Gated Channel Alpha 8 polypeptide. Non-limiting examples of SCN8A genes include: NCBI Gene ID: 6335 [human], NCBI Gene ID: 477604 [canine], NCBI Gene ID: 100052777 [equine], NCBI Gene ID: 101096578 [feline], as well as synonymous and non-synonymous sequence variants thereof. Non-limiting examples of gene products encoded by a SCN8A gene include: UniProt: Q9UQD0; NP_001171455.1 [human], XP_038294063.1 [canine], XP_023499351.1 [equine], XP_023112849.1 [feline], as well as sequence variants, isoforms encoded by alternative splicing, and various glycoforms thereof. Canonically, the protein encoded by these genes is the ion pore subunit of the voltage-gated sodium channel and is essential for rapid membrane depolarization during neuronal action potentials. In some instances, and merely for the sake of disambiguation, a prefix is added when referring to the protein or gene of a particular species (with h, c, e, and f, referring to the human, canine, equine, and feline forms, respectively).

[0175] The term “SCN9A gene” refers to a mammalian gene encoding a Sodium Voltage-Gated Channel Alpha 9 polypeptide. Non-limiting examples of SCN9A genes include: NCBI Gene ID: 6335 [human], NCBI Gene ID: 100855710 [canine], NCBI Gene ID: 100052120 [equine], NCBI Gene ID: 101082841 [feline], as well as synonymous and non-synonymous sequence variants thereof. Non-limiting examples of gene products encoded by a SCN9A gene include: UniProt: Q15858; NP_001352465.1 [human], XP_038302872.1 [canine], XP_023478844.1 [equine], XP_044889827.1 [feline], as well as sequence variants, isoforms encoded by alternative splicing, and various glycoforms thereof. Canonically, the protein encoded by these genes is a voltage-dependent sodium ion channel that has been associated with various pain disorders, especially in the development of inflammatory pain. In some instances, and merely for the sake of disambiguation, a prefix is added when referring to the protein or gene of a particular species (with h, c, e, and f, referring to the human, canine, equine, and feline forms, respectively).

[0176] The term “SCN10A gene” refers to a mammalian gene encoding a Sodium Voltage-Gated Channel Alpha 10 polypeptide. Non-limiting examples of SCN10A genes include: NCBI Gene ID: 6336 [human], NCBI Gene ID: 477026 [canine], NCBI Gene ID: 100055493 [equine], NCBI Gene ID: 101085569 [feline], as well as synonymous and non-synonymous sequence variants thereof. Non-limiting examples of gene products encoded by a SCN10A gene include: UniProt: Q9Y5Y9; NP_001280235.2 [human], NP_001003203.1 [canine], XP_014587037.1 [equine], XP_044893784.1 [feline], as well as sequence variants, isoforms encoded by alternative splicing, and various glycoforms thereof. Canonically, the protein encoded by these genes is a membrane-spanning subunit of voltage-dependent sodium channels that may be involved in the onset of pain associated with neuropathies. In some instances, and merely for the sake of disambiguation, a prefix is added when referring to the protein or gene of a particular species (with h, c, e, and f, referring to the human, canine, equine, and feline forms, respectively).

[0177] The term “SCN11A gene” refers to a mammalian gene encoding a Sodium Voltage-Gated Channel Alpha 11 polypeptide. Non-limiting examples of SCN11A genes include: NCBI Gene ID: 11280 [human], NCBI Gene ID: 485593 [canine], NCBI Gene ID: 100068480 [equine], NCBI Gene ID: 101085312 [feline], as well as synonymous and non-synonymous sequence variants thereof. Non-limiting examples of gene products encoded by a SCN11A gene include: UniProt: Q9UI33; NP_001336182.1 [human], XP038426400.1 [canine], XP_001916634.3 [equine], XP_044893782.1 [feline], as well as sequence variants, isoforms encoded by alternative splicing, and various glycoforms thereof. Canonically, the protein encoded by these genes is a membrane-spanning subunit of voltage-dependent sodium channels and is highly expressed in nociceptive neurons of dorsal root ganglia and trigeminal ganglia. Mutations in the SCN11A gene have been associated with various pain disorders. In some instances, and merely for the sake of disambiguation, a prefix is added when referring to the protein or gene of a particular species (with h, c, e, and f, referring to the human, canine, equine, and feline forms, respectively).

[0178] The term “TAC1 gene” refers to a mammalian gene encoding a Tachykinin Precursor 1 polypeptide. Non-limiting examples of TAC1 genes include: NCBI Gene ID: 6863 [human], NCBI Gene ID: 475239 [canine], NCBI Gene ID: 100052324 [equine], NCBI Gene ID: 101095481 [feline], as well as synonymous and non-synonymous sequence variants thereof. Non-limiting examples of gene products encoded by a TAC1 gene include: UniProt: P20366; NP_003173.1 [human], XP_038541905.1 [canine], XP_014594521.1 [equine], XP_003982840.1 [feline], as well as sequence variants, isoforms encoded by alternative splicing, and various glycoforms thereof. Canonically, the protein encoded by these genes is a precursor for four products of the tachykinin peptide hormone family-substance P, neurokinin A, neuropeptide K and neuropeptide gamma. These hormones are thought to function as neurotransmitters that interact with nerve receptors and smooth muscle cells. In some instances, and merely for the sake of disambiguation, a prefix is added when referring to the protein or gene of a particular species (with h, c, e, and f, referring to the human, canine, equine, and feline forms, respectively).

[0179] The term “TAC3 gene” refers to a mammalian gene encoding a Tachykinin Precursor 3 polypeptide. Non-limiting examples of TAC3 genes include: NCBI Gene ID: 6866 [human], NCBI Gene ID: 607315 [canine], NCBI Gene ID: 100052722 [equine], NCBI Gene ID: 101089368 [feline], as well as synonymous and non-synonymous sequence variants thereof. Non-limiting examples of gene products encoded by a TAC3 gene include: UniProt: Q9UHF0; NP_001171525.1 [human], UniProt: A0A8I3N7Z8; NP_001362511.2 canine], XP_023499603.1 [equine], XP_019690663.1 [feline], as well as sequence variants, isoforms encoded by alternative splicing, and various glycoforms thereof. Canonically, the protein encoded by these genes is proteolytically processed to generate a mature peptide, which is primarily expressed in the central and peripheral nervous systems and functions as a neurotransmitter. This peptide is the ligand for the neurokinin-3 receptor. These hormones are thought to function as neurotransmitters that interact with nerve receptors and smooth muscle cells. In some instances, and merely for the sake of disambiguation, a prefix is added when referring to the protein or gene of a particular species (with h, c, e, and f referring to the human, canine, equine, and feline forms, respectively).

[0180] The term “TACR1 gene” refers to a mammalian gene encoding a Tachykinin Receptor 1 polypeptide. Non-limiting examples of TACR1 genes include: NCBI Gene ID: 6869 [human], NCBI Gene ID: 403815 [canine], NCBI Gene ID: 100053491 [equine], NCBI Gene ID: 101090094 [feline], as well as synonymous and non-synonymous sequence variants thereof. Non-limiting examples of gene products encoded by a TACR1 gene include: UniProt: P25103; NP_001049.1 [human], NP_001012637.1 canine], XP_001499730.1 [equine], XP_003984209.1 [feline], as well as sequence variants, isoforms encoded by alternative splicing, and various glycoforms thereof. Canonically, the protein encoded by these genes is the receptor for the tachykinin substance P, also referred to as neurokinin 1. TACR1 activates a phosphatidylinositol-calcium second messenger system and can also bind substance K and neuromedin-K with less affinity. In some instances, and merely for the sake of disambiguation, a prefix is added when referring to the protein or gene of a particular species (with h, c, e, and f referring to the human, canine, equine, and feline forms, respectively).

[0181] The term “TACR2 gene” refers to a mammalian gene encoding a Tachykinin Receptor 2 polypeptide. Non-limiting examples of TACR2 genes include: NCBI Gene ID: 6865 [human], NCBI Gene ID: 489020 [canine], NCBI Gene ID: 100034168 [equine], NCBI Gene ID: 101094541 [feline]], as well as synonymous and non-synonymous sequence variants thereof. Non-limiting examples of gene products encoded by a TACR2 gene include: UniProt: P21452; NP_001048.2 [human], NP 001012635.1 [canine], XP_001502752.2 [equine], XP_044896003.1 [feline], as well as sequence variants, isoforms encoded by alternative splicing, and various glycoforms thereof. Canonically, the protein encoded by these genes is the receptor for the tachykinin substance K, also referred to as neurokinin A. TACR2 activates a phosphatidylinositol-calcium second messenger system and can also bind neuromedin-K and substance P with less affinity. In some instances, and merely for the sake of disambiguation, a prefix is added when referring to the protein or gene of a particular species (with h, c, e, and f referring to the human, canine, equine, and feline forms, respectively).

[0182] The term “TACR3 gene” refers to a mammalian gene encoding a Tachykinin Receptor 3 polypeptide. Non-limiting examples of TACR3 genes include: NCBI Gene ID: 6870 [human], NCBI Gene ID: 403814 [canine], NCBI Gene ID: 100073088 [equine], NCBI Gene ID: 101093603 [feline], as well as synonymous and non-synonymous sequence variants thereof. Non-limiting examples of gene products encoded by a TACR3 gene include: UniProt: P29371; NP_001050.1 [human], NP_001091010.1 [canine], XP_023492571.1 [equine], XP_003985169.3 [feline], as well as sequence variants, isoforms encoded by alternative splicing, and various glycoforms thereof. Canonically, the protein encoded by these genes is the receptor for the tachykinin neurokinin 3, also referred to as neurokinin B or neuromedin-K. TACR3 activates a phosphatidylinositol-calcium second messenger system and can also bind substance K and substance P with less affinity. In some instances, and merely for the sake of disambiguation, a prefix is added when referring to the protein or gene of a particular species (with h, c, e, and f referring to the human, canine, equine, and feline forms, respectively).

[0183] The term “MRGPRX2 gene” refers to a mammalian gene encoding a MAS related GPR family member X2 polypeptide. Non-limiting examples of MRGPRX2 genes include: NCBI Gene ID: 117194 [human], NCBI Gene ID: 485410 [canine], NCBI Gene ID: 100071950 [equine], NCBI Gene ID: 101097092 [feline]) or an encoded gene product (e.g., UniProt: Q96LB1; NP_001290544.1 [human], XP_038285538.1 [canine], XP_023501936.1 [equine], XP_003993155.1 [feline], as well as sequence variants, isoforms encoded by alternative splicing, and various glycoforms thereof. Canonically, the protein encoded by these genes enables G protein-coupled receptor activity and neuropeptide binding activity and is involved in mast cell degranulation and positive regulation of cytokinesis. In some instances, and merely for the sake of disambiguation, a prefix is added when referring to the protein or gene of a particular species (with h, c, e, and f referring to the human, canine, equine, and feline forms, respectively).

[0184] The term “ATP1A1 gene” refers to a mammalian gene encoding a ATPase Na+/K+ transporting subunit alpha 1 polypeptide. Non-limiting examples of ATP1A1 genes include: NCBI Gene ID: 476 [human], NCBI Gene ID: 403992 [canine], NCBI Gene ID: 100034139 [equine], NCBI Gene ID: 101083695 [feline], as well as synonymous and non-synonymous sequence variants thereof. Non-limiting examples of gene products encoded by a ATP1A1 gene include: UniProt: P05023; NP_000692.2 [human], NP_001376153.1 [canine], NP_001108004.2 [equine], XP_011283388.1 [feline], as well as sequence variants, isoforms encoded by alternative splicing, and various glycoforms thereof. Canonically, the protein encoded by these genes is an integral membrane protein subunit of the complex responsible for establishing and maintaining the electrochemical gradients of Na and K ions across a plasma membrane, which is essential for osmoregulation and electrical excitability of nerve and muscle. In some instances, and merely for the sake of disambiguation, a prefix is added when referring to the protein or gene of a particular species (with h, c, e, and f referring to the human, canine, equine, and feline forms, respectively).

[0185] The term “CALCA gene” refers to a mammalian gene encoding a Calcitonin Related Polypeptide Alpha polypeptide. Non-limiting examples of CALCA genes include: NCBI Gene ID: 796 [human], NCBI Gene ID: 403946 [canine], NCBI Gene ID: 100033906 [equine], NCBI Gene ID: 101095582 [feline], as well as synonymous and non-synonymous sequence variants thereof. Non-limiting examples of gene products encoded by a CALCA gene include: UniProt: P01258; NP_001029124.1 [human], NP 001300719.1 [canine], NP_001075323.1 [equine], XP_019667660.1 [feline], as well as sequence variants, isoforms encoded by alternative splicing, and various glycoforms thereof. Canonically, this gene encodes multiple gene products, such as calcitonin, calcitonin gene-related peptide and katacalcin, through tissue-specific alternative RNA splicing of the gene transcripts and cleavage of inactive precursor proteins. The proteins are involved in calcium regulation, regulate phosphorus metabolism, and function as a vasodilator, among other functions. In some instances, and merely for the sake of disambiguation, a prefix is added when referring to the protein or gene of a particular species (with h, c, e, and f referring to the human, canine, equine, and feline forms, respectively).

[0186] The term “CALCB gene” refers to a mammalian gene encoding a Calcitonin Related Polypeptide Beta polypeptide. Non-limiting examples of CALCB genes include: NCBI Gene ID: 797 [human], NCBI Gene ID: 403415 [canine], NCBI Gene ID: 100034126 [equine], NCBI Gene ID: 101094539 [feline], as well as synonymous and non-synonymous sequence variants thereof. Non-limiting examples of gene products encoded by a CALCB gene include: UniProt: P10092; NP_000719.1 [human], NP_001002948.1 [canine], NP_001075397.1 [equine], XP_044894937.1 [feline], as well as sequence variants, isoforms encoded by alternative splicing, and various glycoforms thereof. Canonically, the protein encoded by these genes acts as a vasodilator and a neurotransmitter, among other functions. In some instances, and merely for the sake of disambiguation, a prefix is added when referring to the protein or gene of a particular species (with h, c, e, and f referring to the human, canine, equine, and feline forms, respectively).

[0187] The term “CALCRL gene” refers to a mammalian gene encoding a Calcitonin Receptor Like Receptor polypeptide. Non-limiting examples of CALCRL genes include: NCBI Gene ID: 10203 [human], NCBI Gene ID: 488438 [canine], NCBI Gene ID: 100054281 [equine], NCBI Gene ID: 101086333 [feline], as well as synonymous and non-synonymous sequence variants thereof. Non-limiting examples of gene products encoded by a CALCRL gene include: UniProt: Q16602; NP_001258680.1 [human], XP_038303202.1 [canine], XP_023477941.1 [equine]. XP_011283721.1 [feline], as well as sequence variants, isoforms encoded by alternative splicing, and various glycoforms thereof. Canonically, the protein encoded by these genes comprises the receptor for CGRP (with RAMP1) and receptor for ADM (with RAMP2/3) and activates adenylyl cyclase. In some instances, and merely for the sake of disambiguation, a prefix is added when referring to the protein or gene of a particular species (with h, c, e, and f, referring to the human, canine, equine, and feline forms, respectively).

[0188] The term “RAMP1 gene” refers to a mammalian gene encoding a Receptor Activity Modifying Protein 1 polypeptide. Non-limiting examples of RAMP1 genes include: NCBI Gene ID: 10267 [human], NCBI Gene ID: 607163 [canine], NCBI Gene ID: 100066550 [equine], NCBI Gene ID: 101092133 [feline], as well as synonymous and non-synonymous sequence variants thereof. Non-limiting examples of gene products encoded by a RAMP1 gene include: UniProt: 060894; NP_005846.1 [human], XP_038291846.1 [canine], XP_023498460.1 [equine], XP_044890618.1 [feline], as well as sequence variants, isoforms encoded by alternative splicing, and various glycoforms thereof. Canonically, the protein encoded by these genes is required to transport calcitonin-receptor-like receptor (CRLR) to the plasma membrane and, with CRLR, functions as a CGRP receptor. In some instances, and merely for the sake of disambiguation, a prefix is added when referring to the protein or gene of a particular species (with h, c, e, and f, referring to the human, canine, equine, and feline forms, respectively).

[0189] The term “ADM gene” refers to a mammalian gene encoding an Adrenomedullin polypeptide. Non-limiting examples of ADM genes include: NCBI Gene ID: 133 [human], NCBI Gene ID: 403817 [canine], NCBI Gene ID: 100033857 [equine], NCBI Gene ID: 101087095 [feline], as well as synonymous and non-synonymous sequence variants thereof. Non-limiting examples of gene products encoded by a ADM gene include: UniProt: P35318; NP_001115.1 [human], NP_001003183.1 [canine], NP_001157351.1 [equine], XP_044894880.1 [feline], as well as sequence variants, isoforms encoded by alternative splicing, and various glycoforms thereof. Canonically, the protein encoded by this gene is a 52 aa peptide with several functions, including vasodilation, regulation of hormone secretion, promotion of angiogenesis. In some instances, and merely for the sake of disambiguation, a prefix is added when referring to the protein or gene of a particular species (with h, c, e, and f, referring to the human, canine, equine, and feline forms, respectively).

[0190] The term “CRCP gene” refers to a mammalian gene encoding a CGRP Receptor Component polypeptide. Non-limiting examples of CRCP genes include: NCBI Gene ID: 27297 [human], NCBI Gene ID: 479705 [canine], NCBI Gene ID: 100061681 [equine], NCBI Gene ID: 101084503 [feline], as well as synonymous and non-synonymous sequence variants thereof. Non-limiting examples of gene products encoded by a CRCP gene include: UniProt: 075575; NP_001035737.1 [human], XP_038523718.1 [canine], XP_001493592.3 [equine], XP_044903465.1 [feline], as well as sequence variants, isoforms encoded by alternative splicing, and various glycoforms thereof. Canonically, the protein encoded by this gene is an accessory protein for the CGRP receptor that modulates CGRP responsiveness in a variety of tissues. In some instances, and merely for the sake of disambiguation, a prefix is added when referring to the protein or gene of a particular species (with h, c, e, and f, referring to the human, canine, equine, and feline forms, respectively).

[0191] The term “YAP1 gene” refers to a mammalian gene encoding a Yes1-Associated Protein polypeptide. Non-limiting examples of YAP1 genes include: NCBI Gene ID: 10413 [human], NCBI Gene ID: 479465 [canine], NCBI Gene ID: 100068834 [equine], NCBI Gene ID: 101101408 [feline], as well as synonymous and non-synonymous sequence variants thereof. Non-limiting examples of gene products encoded by a YAP1 gene include: UniProt: P46937; NP_001123617.1 [human], XP_038521022.1 [canine], XP_023500466.1 [equine], XP_044894121.1 [feline], as well as sequence variants, isoforms encoded by alternative splicing, and various glycoforms thereof. Canonically, the protein encoded by this gene is involved in development, growth, repair and homeostasis. In some instances, and merely for the sake of disambiguation, a prefix is added when referring to the protein or gene of a particular species (with h, c, e, and f, referring to the human, canine, equine, and feline forms, respectively).

[0192] The term “IL1RAP gene” refers to a mammalian gene encoding an Interleukin 1 Receptor Accessory Protein polypeptide. Non-limiting examples of ILRAP1 genes include: NCBI Gene ID: 3556 [human], NCBI Gene ID: 488126 [canine], NCBI Gene ID: 100068726 [equine], NCBI Gene ID: 101094125 [felinE], as well as synonymous and non-synonymous sequence variants thereof. Non-limiting examples of gene products encoded by a IL1RAP gene include: UniProt: Q9NPH3; NP_002173.1 [human], XP_038318680.1 [canine], XP_001498597.2 [equine], XP_044893081.1 [feline], as well as sequence variants, isoforms encoded by alternative splicing, and various glycoforms thereof. Canonically, the proteins encoded by the genes listed above are capable of associating with IL1R1 bound to IL1 to form the high affinity interleukin-1 receptor complex that mediates interleukin-1-dependent activation of NF-kappa-B and other signaling pathways through the recruitment of adapter molecules such as TOLLIP, MYD88, and IRAK1 or IRAK2 via TIR-TIR interactions with the cytoplasmic domains of receptor/coreceptor subunits. In some instances, and merely for the sake of disambiguation, a prefix is added when referring to the protein or gene of a particular species (with h, c, e, and f, referring to the human, canine, equine, and feline forms, respectively).

[0193] The term “IL1R1 gene” refers to a mammalian gene encoding an Interleukin I receptor type 1 polypeptide. Non-limiting examples of IL1R1 genes include: NCBI Gene ID: 3554 [human], NCBI Gene ID: 481328 [canine], NCBI Gene ID: 100009699 [equine], NCBI Gene ID: 101080705 [feline], as well as synonymous and non-synonymous sequence variants thereof. Non-limiting examples of gene products encoded by a IL1R1 gene include: UniProt: P14778; NP_001307909.1 [human], XP_038536135.1 [canine], NP_001075263.2 [equine], XP_023107327.2 [feline], as well as sequence variants, isoforms encoded by alternative splicing, and various glycoforms thereof. Canonically, the proteins encoded by the genes listed above are capable of binding all forms of the pro-inflammatory cytokine interleukin 1 (IL1 or IL1) to mediate interleukin-1-dependent activation of NF-kappa-B, MAPK and other signaling pathways. This intracellular signaling involves the recruitment of adapter molecules such as TOLLIP, MYD88, and IRAK1 or IRAK2 via TIR-TIR interactions with the cytoplasmic domains of receptor/coreceptor subunits. IL1R1 can also bind the Interleukin 1 receptor antagonist (IL1Ra or IL1Ra or IL1RN), which prevents association with IL1RAP to form a signaling-competent complex. In some instances, and merely for the sake of disambiguation, a prefix is added when referring to the protein or gene of a particular species (with h, c, e, and f, referring to the human, canine, equine, and feline forms, respectively).

[0194] The term “IL1A gene” refers to a mammalian gene encoding a Interleukin 1 Alpha polypeptide. Non-limiting examples of IL1A genes include: NCBI Gene ID: 3552 [human], NCBI Gene ID: 403782 [canine], NCBI Gene ID: 100064969 [equine], NCBI Gene ID: 493944 [feline], as well as synonymous and non-synonymous sequence variants thereof. Non-limiting examples of gene products encoded by a IL1A gene include: UniProt: P01583; NP_000566.3 [human], NP_001003157.2 [canine], NP_001075969.2 [equine], NP_001009351.1 [feline], as well as sequence variants, isoforms encoded by alternative splicing, and various glycoforms thereof. Canonically, the proteins encoded by the genes listed above are pro-inflammatory cytokines that signal through interaction with IL1R1 and IL1RAP to activate various pathways, including MAPK, JNK and NF-kappa B. In some instances, and merely for the sake of disambiguation, a prefix is added when referring to the protein or gene of a particular species (with h, c, e, and f referring to the human, canine, equine, and feline forms, respectively).

[0195] The term “IL1B gene” refers to a mammalian gene encoding an Interleukin 1 Beta polypeptide. Non-limiting examples of IL1B genes include: NCBI Gene ID: 3553 [human], NCBI Gene ID: 403974 [canine], NCBI Gene ID: 100034237 [equine], NCBI Gene ID: 768274 [feline], as well as synonymous and non-synonymous sequence variants thereof. Non-limiting examples of gene products encoded by an IL1B gene include: UniProt: P01584; NP_000567.1 [human], NP_001033060.1 [canine], NP_001075995.1 [equine], NP_001070882.1 [feline], as well as sequence variants, isoforms encoded by alternative splicing, and various glycoforms thereof. Canonically, the protein encoded by the genes listed above is a major mediator of the inflammatory response and pyrogen that signals through interaction with IL1R1 and IL1RAP. In the central nervous system (CNS) IL1B has been shown to contribute to inflammatory pain hypersensitivity, among other pathologies. In some instances, and merely for the sake of disambiguation, a prefix is added when referring to the protein or gene of a particular species (with h, c, e, and f referring to the human, canine, equine, and feline forms, respectively).

[0196] The term “treatment” refers to obtaining a desired pharmacologic and/or physiologic effect. The effect may be prophylactic in terms of completely or partially preventing a disease or symptom thereof and/or may be therapeutic in terms of a partial or complete cure for a disease and/or adverse effect attributable to the disease. For example, a composition, method, or system of the present disclosure may be administered as a prophylactic treatment to a subject that has a predisposition for a given condition (e.g., arthritis). “Treatment”, as used herein, covers any treatment of a disease in a mammal, particularly in a human, canine, feline, or equine, and includes: (a) preventing the disease from occurring in a subject which may be predisposed to the disease but has not yet been diagnosed as having it; (b) inhibiting the disease, i.e., arresting its development or progression; and (c) relieving the disease, i.e., causing regression of the disease and/or relieving one or more disease symptoms.

[0197] “Treatment” is also meant to encompass delivery of an agent in order to provide for a pharmacologic effect, even in the absence of a disease or condition. For example, “treatment” encompasses delivery of a composition that can elicit an immune response or confer immunity in the absence of a disease condition, e.g., in the case of a vaccine. It is understood that compositions and methods of the present disclosure are applicable to treat all mammals, including, but not limited to human, canine, feline, equine, and bovine subjects.

[0198] The term “therapeutically effective” refers to the amount of a composition or combination of compositions as described herein that is sufficient to effect the intended application including, but not limited to, disease treatment. A therapeutically effective amount may vary depending upon the intended application (in vitro or in vivo), or the subject and disease condition being treated (e.g., the weight, age and gender of the subject), the severity of the disease condition, or the manner of administration. The term also applies to a dose that will induce a particular response in target cells (e.g., the reduction of platelet adhesion and/or cell migration). The specific dose will vary depending on the particular composition(s) chosen, the dosing regimen to be followed, whether the composition is administered in combination with other compositions or compounds, timing of administration, the tissue to which it is administered, and the physical delivery system in which the composition is carried.

[0199] A “spinal condition or disorder” includes, but is not limited to, low back pain, neck pain, discogenic disorders, adolescent idiopathic scoliosis, adult degenerative scoliosis, cervical degenerative disc disease, cervical disc herniation, cervical myelopathy, cervical stenosis, compression fractures, degenerative spondylolisthesis, isthmic spondylolisthesis, low back sprains and strains, lumbar degenerative disc disease, lumbar disc hemiation, lumbar stenosis, neck sprain (whiplash) and strain, neck strain, osteoporosis, and whiplash. Generally, such disorders or conditions contribute to or cause localized nociception, inflammation, or morphological changes (e.g., fibrosis, degeneration, osteolysis, osteogenesis) at the cervical, thoracic, lumbar or sacral spine, or surrounding tissues.

[0200] “Low back pain” is defined as measurable or discernible pain or discomfort (either chronic or sporadic) in a given subject, encompassing at least the lumbar-spinal region of a mammal. The pain may present as being localized to the lower back (e.g., muscle ache) or as shooting, burning, stinging, and/or radiating sensations throughout the subject's back and/or extremities. The pain may be idiopathic or may be associated with one or more (diagnosed or undiagnosed) underlying conditions including, but not limited to degenerative disc disease, chronic inflammation, arthritis, osteoporosis, trauma (e.g., post-surgical), infection (e.g., discospondylitis), neuropathies, musculo-skeletal abnormalities (e.g., slipped discs or spinal stenosis or spondylolisthesis), herniated nucleus pulposus (HNP), annular ligament tears, facet joint arthritis, radicular nerve compression, and/or other degenerative disorders.

[0201] “Neck pain” is defined as measurable or discernable pain or discomfort associated with the cervical spine or adjacent ligaments, muscles, and/or tendons. The pain may manifest as localized pain in the neck or shooting, stinging, burning, and/or radiating sensations throughout the back or extremities, including, but not limited to, the subject's head, shoulders, arms, legs, and/or back. Neck pain may be idiopathic or associated with one or more (diagnosed or undiagnosed) underlying conditions, including, but not limited to, degenerative disc disease, rheumatoid arthritis, osteoporosis, fibromyalgia, chronic inflammation, infection (e.g., discospondylitis), herniated disc, spondylosis, spinal stenosis, cervical compressive myelopathy, whiplash, and/or other disorders.

[0202] The term “polynucleotide,” “nucleotide,” and “nucleic acid” are used interchangeably herein to refer to all forms of nucleic acid, oligonucleotides, including deoxyribonucleic acid (DNA) and ribonucleic acid (RNA). Polynucleotides include genomic DNA, cDNA and antisense DNA, and spliced or unspliced mRNA, rRNA, tRNA, lncRNA, RNA antagomirs, and inhibitory DNA or RNA (RNAi, e.g., small or short hairpin (sh)RNA, microRNA (miRNA), aptamers, small or short interfering (si)RNA, trans-splicing RNA, or antisense RNA). Polynucleotides also include non-coding RNA, which include for example, but are not limited to, RNAi, miRNAs, lncRNAs, RNA antagomirs, aptamers, and any other non-coding RNAs known to those of skill in the art. Polynucleotides include naturally occurring, synthetic, and intentionally altered or modified polynucleotides as well as analogues and derivatives. The term “polynucleotide” also refers to a polymeric form of nucleotides of any length, including deoxyribonucleotides or ribonucleotides, or analogs thereof, and is synonymous with nucleic acid sequence. A polynucleotide may comprise modified nucleotides, such as methylated nucleotides and nucleotide analogs, and may be interrupted by non-nucleotide components. If present, modifications to the nucleotide structure may be imparted before or after assembly of the polymer. The term polynucleotide, as used herein, refers interchangeably to double- and single-stranded molecules. Unless otherwise specified or required, any embodiment as described herein encompassing a polynucleotide encompasses both the double-stranded form and each of two complementary single-stranded forms known or predicted to make up the double-stranded form. Polynucleotides can be single, double, or triplex, linear or circular, and can be of any length. In discussing polynucleotides, a sequence or structure of a particular polynucleotide may be described herein according to the convention of providing the sequence in the 5′ to 3′ direction.

[0203] The term “gene” or “nucleotide sequence encoding a polypeptide” refers to the segment of DNA involved in producing a polypeptide chain. The DNA segment may include regions preceding and following the coding region (leader and trailer) involved in the transcription/translation of the gene product and the regulation of the transcription/translation, as well as intervening sequences (introns) between individual coding segments (exons). For example, a gene includes a polynucleotide containing at least one open reading frame capable of encoding a particular protein or polypeptide after being transcribed and translated.

[0204] The term “extracellular domain” and “ectodomain” may be used interchangeably and, when referring to transmembrane cellular receptors, is defined as the portion of the protein that is exposed to the extracellular environment and is able to engage with and/or bind a ligand.

[0205] The term “cytoplasmic domain” and “intracellular domain” may be used interchangeably and, when referring to transmembrane receptors, define the portion of the protein that is exposed to the cytoplasm. In many instances, these portions of the proteins comprise signaling domains to recruit and associate with various intracellular factors. Following engagement with a ligand via the extracellular domain, the interaction effects changes that may result in new association, dissociation or recruitment of various cytoplasmic factors that aid in transducing a signal.

[0206] The term “transmembrane domain,” which may be abbreviated as “TM,” as it refers to transmembrane receptors, is defined as the portion of the protein is embedded within the plasma membrane (i.e., not exposed to either the extracellular environment or the cytosol). Transmembrane domains are generally of a more hydrophobic character than either the extracellular or cytoplasmic portions and often adopt higher order helical structures. Though its primary role is an anchor, ligand-induced conformational changes to particular receptors have been shown to impact the transmembrane domain such that it is integral to the subsequent intracellular signaling.

[0207] The term “receptor” refers to a protein capable of binding another cognate protein (i.e., its ligand) with high affinity. This receptor-ligand interaction may be 1:1, or result in multimerization, wherein numerous proteins aggregate to bind one or more ligands. Receptors are generally present at the cell surface, such that they may most efficiently encounter a ligand and initiate intracellular signaling.

[0208] The term “intracellular signaling” refers to cellular changes that result due to events occurring at the cell surface. Typically, a soluble ligand binds its receptor at the cell surface, which can induce changes in the receptor, such that associated intracellular factors are also affected. These factors may then impact others within the cell, and this cascade continues until, in many cases, a particular factor is able to alter gene expression in the nucleus in response to the stimulus at the surface.

[0209] The term “RNA-guided nuclease” refers to an enzyme capable of breaking the backbone of, for example, a DNA molecule. The activity of RNA-guided nucleases is directed by a nucleic acid molecule (i.e., guide RNA). Once properly oriented to form a functional ribonucleoprotein complex, the enzyme locates a specific position within a target nucleic acid (e.g., a gene or locus) via sequence complementarity with a portion of the guide RNA. Non-exhaustive examples of RNA-guided nucleases include Cas9, Cas12 and Cas12a (previously known as Cpf1).

[0210] The term “Cas9” refers to an RNA-guided, double-stranded DNA-binding nuclease protein or nickase protein, or a variant thereof and may be used to refer to either naturally-occurring or recombinant Cas9 nucleases variants (e.g., ES-Cas9, HF-Cas9, PE-Cas9, and AR-Cas9). The wildtype Cas9 nuclease has two functional domains, e.g., RuvC and HNH, that simultaneously cut both strands of double stranded DNA, resulting in a double-strand break. Cas9 enzymes described herein may comprise a HNH or HNH-like nuclease domain and/or a RuvC or RuvC-like nuclease domain without impacts on the ability to induce double-strand breaks in genomic DNA (e.g., at a target locus) when both functional domains are active. The Cas9 enzyme may comprise one or more catalytic domains of a Cas9 protein derived from bacteria belonging to the group consisting of Corynebacter, Sutterella, Legionella, Treponema, Filifactor, Eubacterium, Streptococcus, Lactobacillus, Mycoplasma, Bacteroides, Flaviivola, Flavobacterium, Sphaerochaeta, Azospirillum, Gluconacetobacter, Neisseria, Roseburia, Parvibaculum, Staphylococcus, Nitratifractor, and Campylobacter. In some embodiments, the two catalytic domains are derived from different bacteria species.

[0211] As used herein, “PAM” refers to a Protospacer Adjacent Motif and is necessary for an RNA-guided nuclease to bind a target nucleic acid. In many instances, the PAM directly abuts the complementary sequence in the target. Naturally-occurring Cas9, for example, molecules recognize specific PAM sequences (see, e.g., Table 1). In some embodiments, a Cas9 molecule has the same PAM specificities as a naturally occurring Cas9 molecule. In other embodiments, a Cas9 molecule has a PAM specificity not associated with a naturally occurring Cas9 molecule. In other embodiments, a Cas9 molecule's PAM specificity is not associated with the naturally occurring Cas9 molecule to which it has the closest sequence homology. For example, a naturally occurring Cas9 molecule can be altered such that the PAM sequence recognition is altered to decrease off target sites, improve specificity, or eliminate a PAM recognition requirement. In an embodiment, a Cas9 molecule may be altered (e.g., to lengthen a PAM recognition sequence, improve Cas9 specificity to high level of identity, to decrease off target sites, and/or increase specificity). In an embodiment, the length of the PAM recognition sequence is at least 4, 5, 6, 7, 8, 9, 10 or 15 amino acids in length. In some embodiments, a Cas9 molecule may be altered to ablate PAM recognition.

[0212] The term “guide RNA,” “gRNA” or “sgRNA” may be used interchangeably and refer to an RNA molecule, preferably a synthetic RNA molecule, composed of a targeting (crRNA) sequence and scaffold. These molecules, once loaded onto a functional RNA-guided nuclease can direct sequence-specific cleavage of a target nucleic acid.

[0213] An sgRNA can be administered or formulated, e.g., as a synthetic RNA, or as a nucleic acid comprising a sequence encoding the gRNA, which is then expressed in the target cells. As would be evident to one of ordinary skill in the art, various tools may be used in the design and/or optimization of an sgRNA in order to, for example, increase specificity and/or precision of genomic editing at a particular site.

[0214] In general, candidate sgRNAs may be designed and identified by first locating suitable PAMs within a genomic sequence. Then additional calculations may be utilized to predict on-target and off-target efficiencies. Available tools to aid in the initial design and modeling of candidate sgRNAs include, without limitation, CRISPRseek, CRISPRverse, CRISPR Design Tool, Cas-OFFinder, E-CRISP, ChopChop, CasOT, CRISPR direct, CRISPOR, BREAKING-CAS, CrispRGold, and CCTop. See, e.g., Safari, F. et al. (2017). Current Pharmaceutical Biotechnology 18(13), 1038-54 and Hoberecht, L. et al. (2022). Nature Communications 13, 6568, which are incorporated by reference herein in its entirety for all purposes. Such tools are also described, for example, in PCT Publication No. WO2014093701A1 and Liu, G. et al. (2020). Computational and Structural Biotechnology Journal 18, 35-44, each of which is incorporated by reference herein in its entirety for all purposes. Candidate sgRNAs may be further assessed by experimental screening or other methodologies.

[0215] The term “CRISPR RNA” or “crRNA” refer to the portion of an sgRNA molecule with complementarity to the target nucleic acid.

[0216] The phrase “pharmaceutically acceptable” refers to those compounds, materials, compositions, and/or dosage forms that are, within the scope of sound medical judgment, suitable for use in contact with the tissues of human beings and animals without excessive toxicity, irritation, allergic response, or other problems or complications commensurate with a reasonable benefit/risk ratio.

[0217] The term “pharmaceutically acceptable carrier” or “pharmaceutically acceptable excipient” are intended to include any and all solvents, dispersion media, coatings, antibacterial and antifungal agents, isotonic and absorption delaying agents, and inert ingredients. The use of such pharmaceutically acceptable carriers or pharmaceutically acceptable excipients for active pharmaceutical ingredients is well known in the art. Except insofar as any conventional pharmaceutically acceptable carrier or pharmaceutically acceptable excipient is incompatible with the active pharmaceutical ingredient, its use in the therapeutic compositions of the disclosure is contemplated. Additional active pharmaceutical ingredients, such as other drugs, can also be incorporated into the described compositions and methods.

[0218] The term “pharmaceutically acceptable excipient” is intended to include vehicles and carriers capable of being co-administered with a compound to facilitate the performance of its intended function. The use of such media for pharmaceutically active substances is well known in the art. Examples of such vehicles and carriers include solutions, solvents, dispersion media, delay agents, emulsions and the like. Any other conventional carrier suitable for use with the multi-binding compounds also falls within the scope of the present disclosure.

[0219] As used herein, the term “a”, “an”, or “the” generally is construed to cover both the singular and the plural forms.

[0220] The term “about” and “approximately” mean within a statistically meaningful range of a value. Such a range can be within an order of magnitude, preferably within 50%, more preferably within 20%, more preferably still within 10%, and even more preferably within 5% of a given value or range. The allowable variation encompassed by The term “about” or “approximately” depends on the particular system under study, and can be readily appreciated by one of ordinary skill in the art. Moreover, as used herein, The term “about” and “approximately” mean that compositions, amounts, formulations, parameters, shapes and other quantities and characteristics are not and need not be exact, but may be approximate and/or larger or smaller, as desired, reflecting tolerances, conversion factors, rounding off, measurement error and the like, and other factors known to those of skill in the art. In general, a dimension, size, formulation, parameter, shape or other quantity or characteristic is “about” or “approximate,” whether or not expressly stated to be such. It is noted that embodiments of very different sizes, shapes and dimensions may employ the described arrangements.

[0221] The term “substantially” as used herein can refer to a majority of, or mostly, as in at least about 50%, 60%, 70%, 80%, 90%, 95%, 96%, 97%, 98%, 99%, 99.5%, 99.9%, 99.99% or at least about 99.999% or more.

[0222] The transitional terms “comprising,” “consisting essentially of,” and “consisting of,” when used in the appended claims, in original and amended form, define the claim scope with respect to what unrecited additional claim elements or steps, if any, are excluded from the scope of the claim(s). The term “comprising” is intended to be inclusive or open-ended and does not exclude any additional, unrecited element, method, step or material. The term “consisting of” excludes any element, step or material other than those specified in the claim and, in the latter instance, impurities ordinary associated with the specified material(s). The term “consisting essentially of” limits the scope of a claim to the specified elements, steps or material(s) and those that do not materially affect the basic and novel characteristic(s) of the claimed methods and compositions. All compositions, methods, and kits described herein that embody the present disclosure can, in alternate embodiments, be more specifically defined by any of the transitional terms “comprising,” “consisting essentially of,” and “consisting of.”

### III. Methods

### A. CRISPR

[0223] Unless otherwise defined, all technical and scientific terms used herein have the same meaning as commonly understood by one of ordinary skill in the art to which this disclosure belongs. Although methods and materials similar or equivalent to those described herein may be used in the practice or testing of the present disclosure, suitable methods and materials are described below. All publications, patent applications, patents, and other references mentioned herein are incorporated by reference in their entirety. In addition, the materials, methods, and examples are illustrative only and not intended to be limiting.

[0224] In one aspect, the present disclosure encompasses compositions relating to clustered regularly interspaced short palindromic repeats (CRISPR) and CRISPR-associated RNA-guided nucleases and associated methods, components, and compositions (hereafter, CRISPR/Cas systems). Such systems minimally require at least one isolated or non-naturally-occurring RNA-guided nuclease (e.g., a Cas9 protein) and at least one isolated or non-naturally-occurring guide RNA (e.g., an sgRNA) to effectuate augmentation of a nucleic acid sequence (e.g., genomic DNA).

[0225] In some embodiments, a CRISPR/Cas system effectuates the alteration of a targeted gene or locus in a eukaryotic cell by effecting an alteration of the sequence at a target position, e.g., by creating an insertion or deletion (collectively, an indel) or a nucleotide substitution resulting in a truncation, nonsense mutation, missense mutation, or other type of loss-of-function of an encoded product of, for example, a gene for (i) one or more growth factors or growth factor receptors (e.g., FGF2, CCN2, NGF, NTF3, NTF4, BDNF, FGFR1, NGFR, NTRK1, or NTRK2), (ii) one or more metalloproteases or regulators thereof (e.g., ADAM17, ADAMTS1, ADAMTS5, MMP1, MMP2, MMP3, MMP7, MMP8, MMP10, MMP12, MMP13, TIMP1, or TIMP3), (iii) one or more cytokines, chemokines or cytokine/chemokine receptors (e.g., CXCL1, CXCL2, CXCL3, CXCL5, CXCL6, CXCL8, CCL2, CCL3, CCL5, CCL7, CCL20, IL1A, IL1B, IL4, IL6, IL6ST, IL10, IL13, IL17A, IL18, TNF, CXCR1, CXCR2, CCR7, TNFRSF1A, TNFRSF1B, IL1R1, IL1RAP, IL4R, IL6R, IL10RA, IL10RB, IL13RA1, IL13RA2, IL17RA, IL18R1, or IL18RAP), (iv) one or more regulators of neuronal signaling (e.g., SCN1A, SCN2A, SCN3A, SCN4A, SCN5A, SCN8A, SCN9A, SCN10A, SCN11A, TAC1, TAC3, TACR1, TACR2, TACR3, or ATP1A1), (v) one or more other regulators of cell signaling (e.g., CALCA, CALCB, CALCRL, RAMP1, ADM, CRCP, YAP1, MRGPRX2), or (vi) a combination of any genes of (i)-(v). In some embodiments, a CRISPR/Cas system of the present disclosure provides for the alteration of a gene and/or encoded product of a gene, such that the altered product has a resultant loss-of-function and becomes a dominant negative or decoy (e.g., a transmembrane receptor incapable of initiating intracellular signaling or a soluble receptor).

[0226] In one aspect, CRISPR/Cas systems effectuate changes to the sequence of a nucleic acid through nuclease activity. For example, in the case of genomic DNA, the RNA-guided-nuclease locates a target position within a targeted gene or locus by sequence complementarity with the target genomic sequence (e.g., CRISPR RNA (crRNA) or a complementary component of a synthetic single guide RNA (sgRNA)) and cleaves the genomic DNA upon recognition of a particular, nuclease-specific motif called the protospacer adjacent motif (PAM). See generally, Collias, D., & Beisel, C. L. (2021). Nature Communications, 12(1), 1-12.

[0227] Nuclease activity induces a double-strand break (DSB) in the case of genomic DNA. Endogenous cellular mechanisms of DSB repair, namely non-homologous end joining (NHEJ), microhomology-mediated end joining (MMEJ), and homologous recombination, result in erroneous repair at a given target position with some calculable frequency as a result of interference from said components of the CRISPR/Cas system, thereby introducing substitutions or indels into the genomic DNA. See generally Scully, R., et al. (2019). Nature Reviews Molecular Cell Biology, 20(11), 698-714. At some frequency, these indels and/or substitutions may result in frameshifts, nonsense mutations (i.e., early stop codons) or truncations that impact the availability of gene products, such as mRNA and/or protein. In certain embodiments, the CRISPR/Cas system may induce a homology-directed repair (HDR) mechanism leading to insertions of non-random sequences at a target position through the use of templates (e.g., an HDR template) provided to the cell as part of the system along with the nuclease and gRNA. See Bloh, K., & Rivera-Torres, N. (2021). International Journal of Molecular Sciences, 22(8), 3834.

[0228] In general, the minimum requirements of the CRISPR/Cas system will be dependent upon the nuclease (e.g., Cas protein) provided therewith. To this extent, these nucleases have been functionally divided into Types I, III, and V, which all fall into Class 1 and Types II, IV, and VI that are grouped into Class 2.

### Class 1 CRISPR Cas Systems:

[0229] The exact components, compositions, and methods for effectuating a change in a targeted nucleic acid sequence using a Class 1 CRISPR/Cas system will vary, but should minimally include: a nuclease (selected from at least Types I, and III), at least one guide RNA selected from 1) sgRNA or 2) a combination of crRNA and tracrRNA. These CRISPR/Cas systems have been categorized together as Class 1 CRISPR/Cas systems due to their similarities in requirements and mode of action within a eukaryotic cell. To this end, compositions, components, and methods among Class 1 constituents may be considered functionally interchangeable, and the following details, provided merely for exemplary purposes, do not represent an exhaustive list of class members:

[0230] Cas3 (see Table 1) is the prototypical Type I DNA nuclease that functions as the effector protein as part of a larger complex (the Cascade complex comprising Cse1, Cse2), that is capable of genome editing. See generally He, L., et al. (2020). Genes, 11(2), 208. Unlike other CRISPR/Cas systems, Type I systems localize to the DNA target without the Cas3 nuclease via the Cascade complex, which then recruits Cas3 to cleave DNA upon binding and locating the 3′ PAM. The Cascade complex is also responsible for processing crRNAs such that they can be used to guide it to the target position. Because of this functionality, Cascade has the ability to process multiple arrayed crRNAs from a single molecule. See. Luo, M. (2015). Nucleic Acids Research, 43(1), 674-681. As such, Type I system may be used to edit multiple targeted genes or loci from a single molecule.

[0231] Because the natural Cas3 substrate is ssDNA, its function in genomic editing is thought to be as a nickase; however, when targeted in tandem, the resulting edit is a result of blunt end cuts to opposing strands to approximate a blunt-cutting endonuclease, such as Cas9. See Pickar-Oliver, A., & Gersbach, C. A. (2019). Nature Reviews Molecular Cell Biology, 20(8), 490-507.

[0232] Like Type I nucleases, the Type III system relies upon a complex of proteins to effect nucleic acid cleavage. Particularly, Cas10 possesses the nuclease activity to cleave ssDNA in prokaryotes. See Tamulaitis, G. Trends in Microbiology, 25(1), 49-61 (2017). Interestingly, this CRISPR/Cas system, native to archaea, exhibits dual specificity and targets both ssDNA and ssRNA. Aside from this change, the system functions much like Type I in that the crRNA targets an effector complex (similar to Cascade) in a sequence-dependent manner. Similarly, the effector complex processes crRNAs prior to association. The dual nature of this nuclease makes its applications to genomic editing potentially more powerful, as both genomic DNA and, in some cases, mRNAs with the same sequence may be targeted to silence particular targeted genes.

### Class 2 CRISPR Cas Systems:

[0233] The exact components, compositions, and methods for effectuating a change in a targeted nucleic acid sequence using a Class 2 CRISPR/Cas system will vary but should minimally include: a nuclease (selected from at least Types II, and V), at least one guide RNA selected from 1) sgRNA or 2) a combination of crRNA and tracrRNA. These CRISPR/Cas systems have been categorized together as Class 2 CRISPR/Cas systems due to their similarities in requirements and mode of action within a eukaryotic cell. To this end, compositions, components, and methods among Class 2 constituents may be considered functionally interchangeable, and the following details, provided merely for exemplary purposes, do not represent an exhaustive list of class members:

[0234] Type II nucleases are the best-characterized CRISPR/Cas systems, particularly the canonical genomic editing nuclease Cas9 (see Table 1). Multiple Cas9 proteins, derived from various bacterial species, have been isolated. The primary distinction between these nucleases is the PAM, a required recognition site within the targeted dsDNA. After association with a gRNA molecule, the crRNA (or targeting domain of a sgRNA) orients the nuclease at the proper position, but the protein's recognition of the PAM is what induces a cleavage event near that site, resulting in a blunt DSB.

[0235] In addition to the naturally-derived Cas9 proteins, several engineered variants have similarly been reported. These range from Cas9 with enhanced specific (i.e., less off-target activity), such as espCas9. Others have been catalytically modified via point mutations in the RuvC (e.g., D10A) and HNH (e.g., H840A) domains such that they induce only single-strand breaks (i.e., Cas9 nickases). See Frock, R. et al. (2015). Nature Biotechnology, 33(2), 179-186. These have also been shown to be less error-prone in editing. Such mitigation of off-target effects becomes paramount when selecting for a desired insertion (i.e., a knock in mutation, in which a desired nucleotide sequence is introduced into a target nucleic acid molecule) rather than a deletion. Indeed, less off-target effects may aid in the preferred DNA repair mechanism (HDR, in most instances for knock in mutations). See generally Naeem, M., et al. (2020). Cells, 9(7), 1608.

[0236] Additional exemplary further engineered variants of canonical Cas proteins (e.g., mutants, chimeras, and include the following (each of which are hereby incorporated by reference in their entireties for all purposes): WO2015035162A2, WO2019126716A1, WO2019126774A1, WO2014093694A1, WO2014150624A1, US20190225955A1, U.S. Pat. No. 11,427,818, U.S. patent Ser. No. 11/242,542, U.S. patent Ser. No. 11/098,297, U.S. patent Ser. No. 10/876,100, U.S. patent Ser. No. 10/767,193, U.S. patent Ser. No. 10/494,621, and U.S. patent Ser. No. 10/100,291.

[0237] For the avoidance of doubt, SpCas9 collectively refers to any one of the group consisting of espCas9 (also referred to herein as ES-Cas9 or esCas9), HF-Cas9, PE-Cas9, ARCas9 (also referred to as AR-Cas9), SpCas9-D1135E, SpCas9-HF1, HypaCas9, HiFiCas9, xCas9-3.6, xCas9-3.7, Sniper-Cas9, evoCas9, SpartaCas, LZ3Cas9, miCas9, and SuperFi-Cas9. Additional examples of Cas9 variants disclosed in the following are hereby incorporated by reference in their entireties for all purposes: Huang, X., et al. (2022). Cells, 11(14), 2186.

[0238] Like the canonical Cas9 systems, Type V nucleases only require a synthetic sgRNA with a targeting domain complementary to a genomic sequence to carry out genomic editing. These nucleases contain a RuvC domain but lack the HNH domain of Type II nucleases. Further, Cas12, for example, leaves a staggered cut in the dsDNA substrate distal to the PAM, as compared to Cas9's blunt cut next to the PAM. Both Cas12a, also known as Cpf1, and Cas12b, also known as C2c1 (see Table 1), act as part of larger complex of two gRNA-associated nucleases that acts on dsDNA as a quaternary structure, nicking each strand simultaneously. See Zetsche, B. et al. (2015). Cell, 163(3):759-771; see also Liu, L. et al. (2017). Molecular Cell, 65(2):310-322. Additionally, Cas12b (C2c1) is a highly accurate nuclease with little tolerance for mismatches. See Yang, H. et al. (2016). Cell, 167(7):1814-1828.e12.

TABLE 1
Exemplary list of Cas nucleases and their requirements

| | | Type of end | |
|---|---|---|---|
| | | generated | Spacer |
| Nuclease | PAM | (nucleic acid | length |
| (Species) | (5′→3′) | target) | (nt) |
| Cas9 (S. pyogenes) | NGG | Blunt (dsDNA) | 20 |
| Cas9 (S. aureus) | NNGRRT | Blunt (dsDNA) | 20 |
| Cas9 (C. jejuni) | NNNNRYAC | Blunt (dsDNA) | 22 |
| Cas9 (S. thermophilus) | NNAGAAW | Blunt (dsDNA) | 20 |
| Cas9 (N. meningitidis) | NNNNGATT | Blunt (dsDNA) | 24 |
| Cas9 (F. novicida) | NGG | Blunt (dsDNA) | 21 |
| Cas12a | TTTV | 5′ staggered | 23-25 |
| (L. bacterium) | | (dsDNA/ssDNA) | |
| Cas12a | TTTN | 5′ staggered | 24 |
| (Acidaminococcus | | (dsDNA/ssDNA) | |
| sp.) | | | |
| Cas3 (E. coli) | CTT/CCT/ | None/blunt | 32 |
| | CAT/CTC | (ssDNA) | |

[0239] See generally Wang, J., Zhang, C., & Feng, B. (2020). Journal of Cellular and Molecular Medicine, 24(6), 3256-3270, where N=any nucleotide; R=any purine (A or G); Y=any pyrimidine (C or T); W=A or T; V=A, C or G.

[0240] In one aspect, the CRISPR/Cas system of the present disclosure comprises at least one RNA-guided nuclease (e.g. a Cas protein) derived from one or more of the following selected bacterial genera: Corynebacterium, Sutterella, Legionella, Treponema, Filifactor, Eubacterium, Streptococcus, Lactobacillus, Mycoplasma, Bacteroides, Flavobacterium, Spirochaeta, Azospirillum, Gluconacetobacter, Neisseria, Roseburia, Parvibaculum, Nitratifractor, Campylobacter, Pseudomonas, Streptomyces, Staphylococcus, Francisella, Acidaminococcus, Lachnospiraceae, Leptotrichia, and Prevotella. In some embodiments, the Cas protein is derived from Deltaproteobacteria or Planctomycetes bacterial species.

[0241] Some aspects of the present disclosure provide strategies, methods, compositions, and treatment modalities for altering a targeted sequence within a gene locus (e.g., altering the sequence of wild type and/or of a mutant sequence within a cell or within a mammal) by insertion or deletion of one or more nucleotides mediated by an RNA-guided nuclease and one or more guide RNAs (gRNAs), resulting in loss of function of the targeted gene product. In some embodiments, the loss of function results in “knocking out” the gene of interest (i.e., generation of a “knock out”) by ablating gene expression. In some embodiments, the loss function results in a non-functional gene product (i.e., a gene product without all functionality of the wildtype gene product). In some embodiments, the loss of function results in expression of gene product with different characteristics (e.g., different binding affinity or different cellular localization).

[0242] In certain embodiments, the targeted gene is selected from (i) one or more growth factors or growth factor receptors (e.g., FGF2, CCN2, NGF, NTF3, NTF4, BDNF, FGFR1, NGFR, NTRK1, or NTRK2), (ii) one or more metalloproteases or regulators thereof (e.g., ADAM17, ADAMTS1, ADAMTS5, MMP1, MMP2, MMP3, MMP7, MMP8, MMP10, MMP12, MMP13, TIMP1, or TIMP3), (iii) one or more cytokines, chemokines or cytokine/chemokine receptors (e.g., CXCL1, CXCL2, CXCL3, CXCL5, CXCL6, CXCL8, CCL2, CCL3, CCL5, CCL7, CCL20, IL1A, IL1B, IL4, IL6, IL6ST, IL10, IL13, IL17A, IL18, TNF, CXCR1, CXCR2, CCR7, TNFRSF1A, TNFRSF1B, IL1R1, IL1RAP, IL4R, IL6R, IL10RA, IL10RB, IL13RA1, IL13RA2, IL17RA, IL18R1, or IL18RAP), (iv) one or more regulators of neuronal signaling (e.g., SCN1A, SCN2A, SCN3A, SCN4A, SCN5A, SCN8A, SCN9A, SCN10A, SCN11A, TAC1, TAC3, TACR1, TACR2, TACR3, or ATP1A1), (v) one or more other regulators of cell signaling (e.g., CALCA, CALCB, CALCRL, RAMP1, ADM, CRCP, YAP1, MRGPRX2), or (vi) a combination of any genes of (i)-(v). In some embodiments, any region of the targeted gene (e.g., a promoter region, a 5′ untranslated region, a 3′ untranslated region, an exon, an intron, or an exon/intron border) is targeted by an RNA-guided nuclease to alter the gene. In some embodiments, a non-coding region of the targeted gene (e.g., an enhancer region, a promoter region, an intron, 5′ UTR, 3′ UTR, polyadenylation signal) is targeted to alter the gene.

### CRISPR Guide RNAs:

[0243] In one aspect, the CRISPR/Cas system of the present disclosure further provides a gRNA molecule (e.g., an isolated or non-naturally occurring RNA molecule) that interacts with the RNA-guided nuclease. In certain embodiments, the gRNA is an sgRNA comprising a crRNA sequence (also commonly referred to as a spacer sequence) comprising a nucleotide sequence which is complementary to a sequence in a target nucleic acid. In some embodiments, the sgRNA further comprises an RNA scaffolding portion (tracrRNA) that interacts with the RNA-guided nuclease, such that the crRNA is positioned to scan a target nucleic acid for complementarity. In some embodiments, the system is further, optionally, comprised of an oligonucleotide—an HDR template with homology to either side of the target position. See Bloh, K., & Rivera-Torres, N. (2021). International Journal of Molecular Sciences, 22(8):3834.

[0244] In an embodiment, the RNA-guided nuclease and sgRNA are configured to orient an associated nuclease such that a cleavage event, (e.g., a double strand break or a single strand break) occurs sufficiently close to a complementary sequence in the targeted nucleic acid, thereby facilitating an alteration in the nucleic acid sequence. In some embodiments, the crRNA is 20 nucleotides in length. In some embodiments, the crRNA is 14, 15, 16, 17, 18, 19, 20, 21, 22, 23, 24, 25, 26, 27, 28, 29, or 30 nucleotides in length.

[0245] In some embodiments, the crRNA orients the RNA-guided nuclease such that a cleavage event occurs within 1, 2, 3, 4, 5, 10, 15, 20, 25, 30, 35, 40, 45, 50, 55, 60, 65, 70, 75, 80, 85, 90, 95, 100, 125, 150, 175, or 200 nucleotides away from the complementary sequence in the targeted nucleic acid. The double- or single-strand break may be positioned upstream or downstream of the complementary sequence in the targeted nucleic acid. In some embodiments, the cleavage event occurs within a targeted gene. In some embodiments, the cleavage event occurs upstream of a targeted gene.

[0246] In certain embodiments, a second gRNA molecule, comprising a second crRNA orients a second RNA-guided nuclease, such that a cleavage event occurs sufficiently close to a complementary sequence in the targeted nucleic acid, thereby facilitating an alteration in the nucleic acid sequence. In some embodiments, the first gRNA and the second gRNA promote a cleavage event within a single targeted gene. In some embodiments, the first gRNA and the second gRNA promote a cleavage event within different targeted genes. In some embodiments, the second crRNA is 20 nucleotides in length. In some embodiments, the second crRNA is 14, 15, 16, 17, 18, 19, 20, 21, 22, 23, 24, 25, 26, 27, 28, 29, or 30 nucleotides in length.

[0247] In some embodiments, the second crRNA orients the RNA-guided nuclease such that a cleavage event occurs within 1, 2, 3, 4, 5, 10, 15, 20, 25, 30, 35, 40, 45, 50, 55, 60, 65, 70, 75, 80, 85, 90, 95, 100, 125, 150, 175, or 200 nucleotides away from the complementary sequence in the targeted nucleic acid. The double- or single-strand break may be positioned upstream or downstream of the complementary sequence in the targeted nucleic acid. In some embodiments, the cleavage event occurs within a targeted gene. In some embodiments, the cleavage event occurs upstream of a targeted gene.

[0248] In some embodiments, the targeting domains of the first gRNA and the second gRNA are configured such that a cleavage event is positioned, independently for each of the gRNA molecules, within 1, 2, 3, 4, 5, 10, 15, 20, 25, 30, 35, 40, 45, 50, 55, 60, 65, 70, 75, 80, 85, 90, 95, 100, 125, 150, 175, or 200 nucleotides of the others cleavage event. In some embodiments, the first gRNA and the second gRNA molecules alter the targeted nucleic acid sequences simultaneously. In some embodiments, the first gRNA and the second gRNA molecules alter the targeted nucleic acid sequences sequentially.

[0249] In some embodiments, a single-strand break is accompanied by a second single-strand break, positioned by the crRNA of a first gRNA and a second gRNA, respectively. For example, the crRNA may orient the associated RNA-guided nucleases such that a cleavage event, (e.g., the two single-strand breaks), are positioned within 1, 2, 3, 4, 5, 10, 15, 20, 25, 30, 35, 40, 45, 50, 55, 60, 65, 70, 75, 80, 85, 90, 95, 100, 125, 150, 175, or 200 nucleotides of one another. In some embodiments, a first crRNA and a second crRNA are configured to orient associated RNA-guided nucleases such that, for example, two single-strand breaks occurs at the same position, or within 1, 2, 3, 4, 5, 10, 15, 20, 25, 30, 35, 40, 45, 50 nucleotides of one another, on opposing strands of genomic DNA, thereby essentially approximating a double strand break.

[0250] In some embodiments a nucleic acid encodes a second sgRNA molecule. In some embodiments, a nucleic acid encodes a third sgRNA molecule. In some embodiments, a nucleic acid encodes a fourth sgRNA molecule.

[0251] In certain embodiments, a nucleic acid may comprise (a) a sequence encoding a first sgRNA, comprising a crRNA that is complementary with a sequence in a targeted gene, (b) a sequence encoding a second sgRNA, comprising a crRNA that is complementary with a sequence in a second targeted gene, and (c) a sequence encoding an RNA-guided nuclease (e.g., Cas9). Optionally, (d) and (e) are sequences encoding a third sgRNA and a fourth sgRNA, respectively. In some embodiments, the second targeted gene is the same as the first targeted gene. In other embodiments, the second targeted gene is different from the first targeted gene. In some embodiments, (a), (b), and (c) are encoded within the same nucleic acid molecule (e.g., the same vector). In some embodiments, (a) and (b) are encoded within the same nucleic acid molecule. In some embodiments, (a), (b) and (d) are encoded within the same nucleic acid molecule. In some embodiments, (a), (b) and (e) are encoded within the same nucleic acid molecule. In some embodiments, (a), (b), (d) and (e) are encoded within the same nucleic acid molecule. In some embodiments, (a), (b), and (c) are encoded within separate nucleic acid molecules. When more than two sgRNAs are used, any combination of (a), (b), (c), (d) and (e) may be encoded within a single or separate nucleic acid molecules.

[0252] In one aspect, the nucleic acid molecules (i.e., those encoding (a), (b), (c), (d) or (e)) are delivered to a target cell (i.e., any combination of the encoded RNA-guided nuclease of (c) and at least one encoded gRNA molecule of (a), (b), (d), or (e) contact a target cell). In some embodiments, said nucleic acid molecules are delivered to a target cell in vivo. In other embodiments, said nucleic acid molecules are delivered to a target cell ex vivo. In some embodiments, said nucleic acid molecules are delivered to a target cell in vitro. In certain embodiments, said nucleic acid molecules are delivered to a target cell as DNA. In other embodiments, said nucleic acid molecules are delivered to a target cell as RNA (e.g., mRNA). In some embodiments, the products of said nucleic acid molecules are delivered as an assembled ribonucleoprotein (RNP).

[0253] In some embodiments, contacting a target cell comprises delivering said RNA-guided nuclease of (c), as a protein with at least one said nucleic acid molecules selected from (a), (b), (d), and (e). In some embodiments, contacting a target cell comprises delivering said encoded RNA-guided nuclease of (c), as DNA with at least one said nucleic acid molecules selected from (a), (b), (d), and (e). In some embodiments, contacting a target cell comprises delivering said encoded RNA-guided nuclease of (c), as mRNA with at least one said nucleic acid molecules selected from (a), (b), (d), and (e).

[0254] In certain embodiments, CRISPR components are delivered to a target cell via nanoparticles. Exemplary nanoparticles that may be used with all CRISPR/Cas systems disclosed herein include, at least, lipid nanoparticles or liposomes, hydrogel nanoparticles, metalorganic nanoparticles, gold nanoparticles, magnetic nanoparticles and virus-like particles. See generally Xu, C. F. et al. (2021). Advanced Drug Delivery Reviews, 168:3-29.

### B. TALEN

[0255] In one aspect, the present disclosure contemplates use of methods, components, and compositions relating to Transcription Activator-Like Effector Nucleases (TALENs) to effectuate augmentation of a ‘nucleic acid sequence (e.g., a targeted gene.

[0256] TALE stands for “Transcription Activator-Like Effector” proteins, which include TALENs (“Transcription Activator-Like Effector Nucleases”). A method of using a TALE system for gene editing may also be referred to herein as a TALE method. TALEs are naturally occurring proteins from the plant pathogenic bacteria genus Xanthomonas, and contain DNA-binding domains composed of a series of 33-35-amino-acid repeat domains that each recognizes a single base pair. TALE specificity is determined by two hypervariable amino acids that are known as the repeat-variable di-residues (RVDs). Modular TALE repeats are linked together to recognize contiguous DNA sequences. A specific RVD in the DNA-binding domain recognizes a base in the target locus, providing a structural feature to assemble predictable DNA-binding domains. The DNA binding domains of a TALE are fused to the catalytic domain of a type IIS FokI endonuclease to make a targetable TALE nuclease. To induce site-specific mutation, two individual TALEN arms, separated by a 14-20 base pair spacer region, bring FokI monomers in close proximity to dimerize and produce a targeted double-strand break.

[0257] Several large, systematic studies utilizing various assembly methods have indicated that TALE repeats can be combined to recognize virtually any user-defined sequence. Custom-designed TALE arrays are also commercially available through Cellectis Bioresearch (Paris, France), Transposagen Biopharmaceuticals (Lexington, KY, USA), and Life Technologies (Grand Island, NY, USA). TALE and TALEN methods suitable for use in the present disclosure are described in U.S. Patent Application Publication Nos. US 2011/0201118 A1; US 2013/0117869 A1; US 2013/0315884 A1; US 2015/0203871 A1 and US 2016/0120906 A1, the disclosures of which are incorporated by reference herein. Non-limiting examples of genes that may be silenced or inhibited by permanently gene-editing via a TALE method include (i) one or more growth factors or growth factor receptors (e.g., FGF2, CCN2, NGF, NTF3, NTF4, BDNF, FGFR1, NGFR, NTRK1, or NTRK2), (ii) one or more metalloproteases or regulators thereof (e.g., ADAM17, ADAMTS1, ADAMTS5, MMP1, MMP2, MMP3, MMP7, MMP8, MMP10, MMP12, MMP13, TIMP1, or TIMP3), (iii) one or more cytokines, chemokines or cytokine/chemokine receptors (e.g., CXCL1, CXCL2, CXCL3, CXCL5, CXCL6, CXCL8, CCL2, CCL3, CCL5, CCL7, CCL20, IL1A, IL1B, IL4, IL6, IL6ST, IL10, IL13, IL17A, IL18, TNF, CXCR1, CXCR2, CCR7, TNFRSF1A, TNFRSF1B, IL1R1, IL1RAP, IL4R, IL6R, IL10RA, IL10RB, IL13RA1, IL13RA2, IL17RA, IL18R1, or IL18RAP), (iv) one or more regulators of neuronal signaling (e.g., SCN1A, SCN2A, SCN3A, SCN4A, SCN5A, SCN8A, SCN9A, SCN10A, SCN11A, TAC1, TAC3, TACR1, TACR2, TACR3, or ATP1A1), (v) one or more other regulators of cell signaling (e.g., CALCA, CALCB, CALCRL, RAMP1, ADM, CRCP, YAP1, MRGPRX2), or (vi) a combination of any genes of (i)-(v). In an aspect, the disclosure provides compositions for up-regulation of protein receptors (including wildtype or genetically edited), including those that bind to anti-inflammatory cytokines via a TALE method.

[0258] Examples of systems, methods, and compositions for altering the expression of a target gene sequence by a TALE method, and which may be used in accordance with embodiments of the present disclosure, are described in U.S. Pat. No. 8,586,526, which is incorporated by reference herein.

### C. Zinc-Finger Nucleases (ZFN)

[0259] In one aspect, the present disclosure contemplates use of methods, components, and compositions relating to zinc-finger nucleases (ZFNs) to effectuate augmentation of a ‘nucleic acid sequence (e.g., a targeted gene).

[0260] An individual zinc finger contains approximately 30 amino acids in a conserved ββα configuration. Several amino acids on the surface of the α-helix typically contact 3 bp in the major groove of DNA, with varying levels of selectivity. Zinc fingers have two protein domains. The first domain is the DNA binding domain, which includes eukaryotic transcription factors and contain the zinc finger. The second domain is the nuclease domain, which includes the FokI restriction enzyme and is responsible for the catalytic cleavage of DNA.

[0261] The DNA-binding domains of individual ZFNs typically contain between three and six individual zinc finger repeats and can each recognize between 9 and 18 base pairs. If the zinc finger domains are specific for their intended target site then even a pair of 3-finger ZFNs that recognize a total of 18 base pairs can, in theory, target a single locus in a mammalian genome. One method to generate new zinc-finger arrays is to combine smaller zinc-finger “modules” of known specificity. The most common modular assembly process involves combining three separate zinc fingers that can each recognize a 3 base pair DNA sequence to generate a 3-finger array that can recognize a 9 base pair target site. Alternatively, selection-based approaches, such as oligomerized pool engineering (OPEN) can be used to select for new zinc-finger arrays from randomized libraries that take into consideration context-dependent interactions between neighboring fingers. Engineered zinc fingers are available commercially; Sangamo Biosciences (Richmond, CA, USA) has developed a propriety platform (CompoZr@) for zinc-finger construction in partnership with Sigma-Aldrich (St. Louis, MO, USA).

[0262] Non-limiting examples of genes that may be silenced or inhibited by permanently gene-editing via a zinc finger method include (i) one or more growth factors or growth factor receptors (e.g., FGF2, CCN2, NGF, NTF3, NTF4, BDNF, FGFR1, NGFR, NTRK1, or NTRK2), (ii) one or more metalloproteases or regulators thereof (e.g., ADAM17, ADAMTS1, ADAMTS5, MMP1, MMP2, MMP3, MMP7, MMP8, MMP10, MMP12, MMP13, TIMP1, or TIMP3), (iii) one or more cytokines, chemokines or cytokine/chemokine receptors (e.g., CXCL1, CXCL2, CXCL3, CXCL5, CXCL6, CXCL8, CCL2, CCL3, CCL5, CCL7, CCL20, IL1A, IL1B, IL4, IL6, IL6ST, IL10, IL13, IL17A, IL18, TNF, CXCR1, CXCR2, CCR7, TNFRSF1A, TNFRSF1B, IL1R1, IL1RAP, IL4R, IL6R, IL10RA, IL10RB, IL13RA1, IL13RA2, IL17RA, IL18R1, or IL18RAP), (iv) one or more regulators of neuronal signaling (e.g., SCN1A, SCN2A, SCN3A, SCN4A, SCN5A, SCN8A, SCN9A, SCN10A, SCN11A, TAC1, TAC3, TACR1, TACR2, TACR3, or ATP1A1), (v) one or more other regulators of cell signaling (e.g., CALCA, CALCB, CALCRL, RAMP1, ADM, CRCP, YAP1, MRGPRX2), or (vi) a combination of any genes of (i)-(v). Non-limiting examples of genes that may be augmented such that their resultant products function as decoys or dominant negatives by permanently gene-editing via a zinc finger method include. In an aspect, the disclosure provides compositions for up-regulation of protein receptors (including wildtype or genetically edited), including those that bind to anti-inflammatory cytokines via a zinc finger method.

[0263] Examples of systems, methods, and compositions for altering the expression of a target gene sequence by a zinc finger method, which may be used in accordance with embodiments of the present disclosure, are described in U.S. Pat. Nos. 6,534,261, 6,607,882, 6,746,838, 6,794,136, 6,824,978, 6,866,997, 6,933,113, 6,979,539, 7,013,219, 7,030,215, 7,220,719, 7,241,573, 7,241,574, 7,585,849, 7,595,376, 6,903,185, and 6,479,626, which are incorporated by reference herein.

[0264] Other examples of systems, methods, and compositions for altering the expression of a target gene sequence by a zinc finger method, which may be used in accordance with embodiments of the present disclosure, are described in Beane, et al., Mol. Therapy, 2015, 23 1380-1390, the disclosure of which is incorporated by reference herein.

### IV. Spinal Conditions or Disorders

### A. Introduction

[0265] Spinal conditions or disorders, including low back pain, cervical pain, sacral pain, thoracic pain. And pain or inflammation associated with discogenic disorders e.g., degenerative disc disease (DDD), are a major cause of morbidity and disability worldwide for which few long-term options for amelioration currently exist. Andersson G B. Epidemiological features of chronic low-back pain. Lancet. 1999; 354:581-585. Presently available treatments include surgical or less invasive options that often fail to offer long-term palliation. Ju, et al. Global Spine Journal (2020): 2192568220963058. All vertebrate species are affected by spinal conditions or disorders, including working animals, domestic pets, and their owners. All suffer from the associated discomfort, pain, and disability, depending on the degree of disease progression.

[0266] Spinal conditions or disorders, such as low back pain, are complex diseases characterized by a multitude of inputs contributing to a progressive course of disability. Among these contributors are morphological irregularities (e.g., disc disruptions), inflammation, changes in the localized cellular environment (e.g., vascularization and/or innervation) and degenerative changes. Peng, Bao-Gan. World Journal of Orthopedics 4.2 (2013): 42. Each contributing factor is driven by differential expression of various gene products, including at least pro-inflammatory cytokines, growth factors, pain signaling molecules, and other effector biomolecules. There is a pressing need for new methods and compositions to treat this spectrum of disease and its associated disability.

[0267] The present disclosure provides compositions and methods for spinal conditions or disorders. In some embodiments, said conditions or disorders are treated by editing a gene for any one of (i) one or more growth factors or growth factor receptors (e.g., FGF2, CCN2, NGF, NTF3, NTF4, BDNF, FGFR1, NGFR, NTRK1, or NTRK2), (ii) one or more metalloproteases or regulators thereof (e.g., ADAM17, ADAMTS1, ADAMTS5, MMP1, MMP2, MMP3, MMP7, MMP8, MMP10, MMP12, MMP13, TIMP1, or TIMP3), (iii) one or more cytokines, chemokines or cytokine/chemokine receptors (e.g., CXCL1, CXCL2, CXCL3, CXCL5, CXCL6, CXCL8, CCL2, CCL3, CCL5, CCL7, CCL20, IL1A, IL1B, IL4, IL6, IL6ST, IL10, IL13, IL17A, IL18, TNF, CXCR1, CXCR2, CCR7, TNFRSF1A, TNFRSF1B, IL1R1, IL1RAP, IL4R, IL6R, IL10RA, IL10RB, IL13RA1, IL13RA2, IL17RA, IL18R1, or IL18RAP), (iv) one or more regulators of neuronal signaling (e.g., SCN1A, SCN2A, SCN3A, SCN4A, SCN5A, SCN8A, SCN9A, SCN10A, SCN11A, TAC1, TAC3, TACR1, TACR2, TACR3, or ATP1A1), (v) one or more other regulators of cell signaling (e.g., CALCA, CALCB, CALCRL, RAMP1, ADM, CRCP, YAP1, MRGPRX2), or (vi) a combination of any genes of (i)-(v) to ameliorate pain.

[0268] In some embodiments, the condition or disorder is low back pain. In some embodiments, the condition or disorder is neck pain. In some embodiments, such conditions or disorders include disorders of the intervertebral discs (IVDs). In some embodiments, the condition or disorder is DDD. In some embodiments, the condition or disorder is a tear in the annulus fibrosis (annular ligament tear). In some embodiments, the condition or disorder is a herniation of the nucleous pulposus (HNP) or herniated disc. In some embodiments, the condition or disorder is arthritis of the facet joints of the spine. In some embodiments, the condition or disorder is spondylosis. In some embodiments, the condition or disorder is painful scoliosis. In some embodiments, the condition or disorder is spinal stenosis.

[0269] Among the advantages of the present disclosure over treatments currently available for mammals afflicted with spinal conditions or disorders include the period of relief from symptoms. Upon local administration to the spine, a disc (e.g., vertebral disc), or an intradiscal space (e.g., intradiscal injection) and subsequent genetic editing of a cell (e.g., a chondrocyte, a tenocyte, an osteocyte, a monocyte, a macrophage or the cells of the nucleus pulposus or annulus fibrosus), pro-inflammatory signaling is silenced through the targeted gene for the life of that cell. By contrast, biologic treatments require periodic dosing, which may magnify the impact of any side effects, which can be severe. Among various genetic approaches, the present disclosure is also superior due to the ability to target either a particular ligand or receptor depending on whether the issue is more systemic (i.e., throughout the back or spine, wherein targeting a circulating ligand may be advantageous) or localized (wherein targeting, for instance, a proinflammatory receptor may calm nociception). In either instance, the formulations of locally administered compositions disclosed herein are preferred over widespread (i.e., affecting multiple organ systems or intentionally spreading via blood circulation) ablation of gene expression altogether.

### B. Low Back Pain

[0270] In one aspect, the present disclosure encompasses treatments for low back pain. In some embodiments, the low back pain treatment comprises a therapeutically effective amount of a Clustered Regularly Interspaced Short Palindromic Repeats (CRISPR) gene-editing system, the system comprising an RNA-guided nuclease or a nucleic acid encoding an RNA-guided nuclease and at least one guide RNA or a nucleic acid encoding at least one guide RNA targeting a gene for: (i) one or more growth factors or growth factor receptors (e.g., FGF2, CCN2, NGF, NTF3, NTF4, BDNF, FGFR1, NGFR, NTRK1, or NTRK2), (ii) one or more metalloproteases or regulators thereof (e.g., ADAM17, ADAMTS1, ADAMTS5, MMP1, MMP2, MMP3, MMP7, MMP8, MMP10, MMP12, MMP13, TIMP1, or TIMP3), (iii) one or more cytokines, chemokines or cytokine/chemokine receptors (e.g., CXCL1, CXCL2, CXCL3, CXCL5, CXCL6, CXCL8, CCL2, CCL3, CCL5, CCL7, CCL20, IL1A, IL1B, TL4, TL6, IL6ST, IL10, TL13, IL17A, TL18, TNF, CXCR1, CXCR2, CCR7, TNFRSF1A, TNFRSF1B, IL1R1, IL1RAP, IL4R, IL6R, IL10RA, IL10RB, IL13RA1, IL13RA2, IL17RA, IL18R1, or IL18RAP), (iv) one or more regulators of neuronal signaling (e.g., SCN1A, SCN2A, SCN3A, SCN4A, SCN5A, SCN8A, SCN9A, SCN10A, SCN11A, TAC1, TAC3, TACR1, TACR2, TACR3, or ATP1A1), (v) one or more other regulators of cell signaling (e.g., CALCA, CALCB, CALCRL, RAMP1, ADM, CRCP, YAP1, MRGPRX2), or (vi) a combination of any genes of (i)-(v) to ameliorate pain in a mammal, e.g., a human, dog, horse, or cat.

### C. Neck Pain

[0271] In one aspect, the present disclosure encompasses treatments for neck pain. In some embodiments, the neck pain treatment comprises a therapeutically effective amount of a Clustered Regularly Interspaced Short Palindromic Repeats (CRISPR) gene-editing system, the system comprising an RNA-guided nuclease or a nucleic acid encoding an RNA-guided nuclease and at least one guide RNA or a nucleic acid encoding at least one guide RNA targeting a gene for: (i) one or more growth factors or growth factor receptors (e.g., FGF2, CCN2, NGF, NTF3, NTF4, BDNF, FGFR1, NGFR, NTRK1, or NTRK2), (ii) one or more metalloproteases or regulators thereof (e.g., ADAM17, ADAMTS1, ADAMTS5, MMP1, MMP2, MMP3, MMP7, MMP8, MMP10, MMP12, MMP13, TIMP1, or TIMP3), (iii) one or more cytokines, chemokines or cytokine/chemokine receptors (e.g., CXCL1, CXCL2, CXCL3, CXCL5, CXCL6, CXCL8, CCL2, CCL3, CCL5, CCL7, CCL20, IL1A, IL1B, IL4, IL6, IL6ST, IL10, IL13, IL17A, IL18, TNF, CXCR1, CXCR2, CCR7, TNFRSF1A, TNFRSF1B, IL1R1, IL1RAP, IL4R, IL6R, IL10RA, IL10RB, IL13RA1, IL13RA2, IL17RA, IL18R1, or IL18RAP), (iv) one or more regulators of neuronal signaling (e.g., SCN1A, SCN2A, SCN3A, SCN4A, SCN5A, SCN8A, SCN9A, SCN10A, SCN11A, TAC1, TAC3, TACR1, TACR2, TACR3, or ATP1A1), (v) one or more other regulators of cell signaling (e.g., CALCA, CALCB, CALCRL, RAMP1, ADM, CRCP, YAP1, MRGPRX2), or (vi) a combination of any genes of (i)-(v) to ameliorate pain in a mammal, e.g., a human, dog, horse, or cat.

### D. DDD

[0272] In one aspect, the present disclosure encompasses treatments for degenerative disc disease (DDD). In some embodiments, the DDD treatment comprises a therapeutically effective amount of a Clustered Regularly Interspaced Short Palindromic Repeats (CRISPR) gene-editing system, the system comprising an RNA-guided nuclease or a nucleic acid encoding an RNA-guided nuclease and at least one guide RNA or a nucleic acid encoding at least one guide RNA targeting a gene for: (i) one or more growth factors or growth factor receptors (e.g., FGF2, CCN2, NGF, NTF3, NTF4, BDNF, FGFR1, NGFR, NTRK1, or NTRK2), (ii) one or more metalloproteases or regulators thereof (e.g., ADAM17, ADAMTS1, ADAMTS5, MMP1, MMP2, MMP3, MMP7, MMP8, MMP10, MMP12, MMP13, TIMP1, or TIMP3), (iii) one or more cytokines, chemokines or cytokine/chemokine receptors (e.g., CXCL1, CXCL2, CXCL3, CXCL5, CXCL6, CXCL8, CCL2, CCL3, CCL5, CCL7, CCL20, IL1A, IL1B, IL4, IL6, IL6ST, IL10, IL13, IL17A, IL18, TNF, CXCR1, CXCR2, CCR7, TNFRSF1A, TNFRSF1B, IL1R1, IL1RAP, IL4R, IL6R, IL10RA, IL10RB, IL13RA1, IL13RA2, IL17RA, IL18R1, or IL18RAP), (iv) one or more regulators of neuronal signaling (e.g., SCN1A, SCN2A, SCN3A, SCN4A, SCN5A, SCN8A, SCN9A, SCN10A, SCN11A, TAC1, TAC3, TACR1, TACR2, TACR3, or ATP1A1), (v) one or more other regulators of cell signaling (e.g., CALCA, CALCB, CALCRL, RAMP1, ADM, CRCP, YAP1, MRGPRX2), or (vi) a combination of any genes of (i)-(v) to ameliorate pain in a mammal, e.g., a human, dog, horse, or cat.

### E. Annular Ligament Tear

[0273] In one aspect, the present disclosure encompasses treatments for a tear in the annulus fibrosis (i.e., an annular ligament tear). In some embodiments, the annular ligament tear treatment comprises a therapeutically effective amount of a Clustered Regularly Interspaced Short Palindromic Repeats (CRISPR) gene-editing system, the system comprising an RNA-guided nuclease or a nucleic acid encoding an RNA-guided nuclease and at least one guide RNA or a nucleic acid encoding at least one guide RNA targeting a gene for: (i) one or more growth factors or growth factor receptors (e.g., FGF2, CCN2, NGF, NTF3, NTF4, BDNF, FGFR1, NGFR, NTRK1, or NTRK2), (ii) one or more metalloproteases or regulators thereof (e.g., ADAM17, ADAMTS1, ADAMTS5, MMP1, MMP2, MMP3, MMP7, MMP8, MMP10, MMP12, MMP13, TIMP1, or TIMP3), (iii) one or more cytokines, chemokines or cytokine/chemokine receptors (e.g., CXCL1, CXCL2, CXCL3, CXCL5, CXCL6, CXCL8, CCL2, CCL3, CCL5, CCL7, CCL20, IL1A, IL1B, IL4, IL6, IL6ST, IL10, IL13, IL17A, IL18, TNF, CXCR1, CXCR2, CCR7, TNFRSF1A, TNFRSF1B, IL1R1, IL1RAP, IL4R, IL6R, IL10RA, IL10RB, IL13RA1, IL13RA2, IL17RA, IL18R1, or IL18RAP), (iv) one or more regulators of neuronal signaling (e.g., SCN1A, SCN2A, SCN3A, SCN4A, SCN5A, SCN8A, SCN9A, SCN10A, SCN11A, TAC1, TAC3, TACR1, TACR2, TACR3, or ATP1A1), (v) one or more other regulators of cell signaling (e.g., CALCA, CALCB, CALCRL, RAMP1, ADM, CRCP, YAP1, MRGPRX2), or (vi) a combination of any genes of (i)-(v) to ameliorate pain in a mammal, e.g., a human, dog, horse, or cat.

### F. HNP Herniation (Herniated Disc)

[0274] In one aspect, the present disclosure encompasses treatments for hemiation of the nucleous pulposus (HNP) or herniated disc. In some embodiments, the HNP herniation/herniated disc treatment comprises a therapeutically effective amount of a Clustered Regularly Interspaced Short Palindromic Repeats (CRISPR) gene-editing system, the system comprising an RNA-guided nuclease or a nucleic acid encoding an RNA-guided nuclease and at least one guide RNA or a nucleic acid encoding at least one guide RNA targeting a gene for: (i) one or more growth factors or growth factor receptors (e.g., FGF2, CCN2, NGF, NTF3, NTF4, BDNF, FGFR1, NGFR, NTRK1, or NTRK2), (ii) one or more metalloproteases or regulators thereof (e.g., ADAM17, ADAMTS1, ADAMTS5, MMP1, MMP2, MMP3, MMP7, MMP8, MMP10, MMP12, MMP13, TIMP1, or TIMP3), (iii) one or more cytokines, chemokines or cytokine/chemokine receptors (e.g., CXCL1, CXCL2, CXCL3, CXCL5, CXCL6, CXCL8, CCL2, CCL3, CCL5, CCL7, CCL20, IL1A, IL1B, IL4, IL6, IL6ST, IL10, IL13, IL17A, IL18, TNF, CXCR1, CXCR2, CCR7, TNFRSF1A, TNFRSF1B, IL1R1, IL1RAP, IL4R, IL6R, IL10RA, IL10RB, IL13RA1, IL13RA2, IL17RA, IL18R1, or IL18RAP), (iv) one or more regulators of neuronal signaling (e.g., SCN1A, SCN2A, SCN3A, SCN4A, SCN5A, SCN8A, SCN9A, SCN10A, SCN11A, TAC1, TAC3, TACR1, TACR2, TACR3, or ATP1A1), (v) one or more other regulators of cell signaling (e.g., CALCA, CALCB, CALCRL, RAMP1, ADM, CRCP, YAP1, MRGPRX2), or (vi) a combination of any genes of (i)-(v) to ameliorate pain in a mammal, e.g., a human, dog, horse, or cat.

### G. Facet Joint Arthritis

[0275] In one aspect, the present disclosure encompasses treatments for arthritis of the facet joints of the spine. In some embodiments, the facet joint arthritis treatment comprises a therapeutically effective amount of a Clustered Regularly Interspaced Short Palindromic Repeats (CRISPR) gene-editing system, the system comprising an RNA-guided nuclease or a nucleic acid encoding an RNA-guided nuclease and at least one guide RNA or a nucleic acid encoding at least one guide RNA targeting a gene for: (i) one or more growth factors or growth factor receptors (e.g., FGF2, CCN2, NGF, NTF3, NTF4, BDNF, FGFR1, NGFR, NTRK11, or NTRK2), (ii) one or more metalloproteases or regulators thereof (e.g., ADAM17, ADAMTS1, ADAMTS5, MMP1, MMP2, MMP3, MMP7, MMP8, MMP10, MMP12, MMP13, TIMP1, or TIMP3), (iii) one or more cytokines, chemokines or cytokine/chemokine receptors (e.g., CXCL1, CXCL2, CXCL3, CXCL5, CXCL6, CXCL8, CCL2, CCL3, CCL5, CCL7, CCL20, IL1A, IL1B, IL4, IL6, IL6ST, IL10, IL13, IL17A, IL18, TNF, CXCR1, CXCR2, CCR7, TNFRSF1A, TNFRSF1B, IL1R1, IL1RAP, IL4R, IL6R, IL10RA, IL10RB, IL13RA1, IL13RA2, IL17RA, IL18R1, or IL18RAP), (iv) one or more regulators of neuronal signaling (e.g., SCN1A, SCN2A, SCN3A, SCN4A, SCN5A, SCN8A, SCN9A, SCN10A, SCN11A, TAC1, TAC3, TACR1, TACR2, TACR3, or ATP1A1), (v) one or more other regulators of cell signaling (e.g., CALCA, CALCB, CALCRL, RAMP1, ADM, CRCP, YAP1, MRGPRX2), or (vi) a combination of any genes of (i)-(v) to ameliorate pain in a mammal, e.g., a human, dog, horse, or cat.

### H. IVD Disease

[0276] In one aspect, the present disclosure encompasses treatments for diseases of the intervertebral disc. In some embodiments, the IVD disease treatment comprises a a therapeutically effective amount of a Clustered Regularly Interspaced Short Palindromic Repeats (CRISPR) gene-editing system, the system comprising an RNA-guided nuclease or a nucleic acid encoding an RNA-guided nuclease and at least one guide RNA or a nucleic acid encoding at least one guide RNA targeting a gene for: (i) one or more growth factors or growth factor receptors (e.g., FGF2, CCN2, NGF, NTF3, NTF4, BDNF, FGFR1, NGFR, NTRK11, or NTRK2), (ii) one or more metalloproteases or regulators thereof (e.g., ADAM17, ADAMTS1, ADAMTS5, MMP1, MMP2, MMP3, MMP7, MMP8, MMP10, MMP12, MMP13, TIMP1, or TIMP3), (iii) one or more cytokines, chemokines or cytokine/chemokine receptors (e.g., CXCL1, CXCL2, CXCL3, CXCL5, CXCL6, CXCL8, CCL2, CCL3, CCL5, CCL7, CCL20, IL1A, IL1B, IL4, IL6, IL6ST, IL10, IL13, IL17A, IL18, TNF, CXCR1, CXCR2, CCR7, TNFRSF1A, TNFRSF1B, IL1R1, IL1RAP, IL4R, IL6R, IL10RA, IL10RB, IL13RA1, IL13RA2, IL17RA, IL18R1, or IL18RAP), (iv) one or more regulators of neuronal signaling (e.g., SCN1A, SCN2A, SCN3A, SCN4A, SCN5A, SCN8A, SCN9A, SCN10A, SCN11A, TAC1, TAC3, TACR1, TACR2, TACR3, or ATP1A1), (v) one or more other regulators of cell signaling (e.g., CALCA, CALCB, CALCRL, RAMP1, ADM, CRCP, YAP1, MRGPRX2), or (vi) a combination of any genes of (i)-(v) to ameliorate pain in a mammal, e.g., a human, dog, horse, or cat.

### L. Spondylosis

[0277] In one aspect, the present disclosure encompasses treatments for spondylosis. In some embodiments, the spondylosis treatment comprises a therapeutically effective amount of a Clustered Regularly Interspaced Short Palindromic Repeats (CRISPR) gene-editing system, the system comprising an RNA-guided nuclease or a nucleic acid encoding an RNA-guided nuclease and at least one guide RNA or a nucleic acid encoding at least one guide RNA targeting a gene for: (i) one or more growth factors or growth factor receptors (e.g., FGF2, CCN2, NGF, NTF3, NTF4, BDNF, FGFR1, NGFR, NTRK1, or NTRK2), (ii) one or more metalloproteases or regulators thereof (e.g., ADAM17, ADAMTS1, ADAMTS5, MMP1, MMP2, MMP3, MMP7, MMP8, MMP10, MMP12, MMP13, TIMP1, or TIMP3), (iii) one or more cytokines, chemokines or cytokine/chemokine receptors (e.g., CXCL1, CXCL2, CXCL3, CXCL5. CXCL6, CXCL8, CCL2, CCL3. CCL5, CCL7, CCL20, IL1A, IL1B, IL4, IL6, IL6ST, IL10, IL13, IL17A, IL18, TNF, CXCR1, CXCR2, CCR7, TNFRSF1A, TNFRSF1B, IL1R1, IL1RAP, IL4R, IL6R, IL10RA, IL10RB, IL13RA1, IL13RA2, IL17RA, IL18R1, or IL18RAP), (iv) one or more regulators of neuronal signaling (e.g., SCN1A, SCN2A, SCN3A, SCN4A, SCN5A, SCN8A, SCN9A, SCN10A, SCN11A, TAC1, TAC3, TACR1, TACR2, TACR3, or ATP1A1), (v) one or more other regulators of cell signaling (e.g., CALCA, CALCB, CALCRL, RAMP1, ADM, CRCP, YAP1, MRGPRX2), or (vi) a combination of any genes of (i)-(v) to ameliorate pain in a mammal, e.g., a human, dog, horse, or cat.

### J. Painful Scoliosis

[0278] In one aspect, the present disclosure encompasses treatments for painful scoliosis. In some embodiments, the painful scoliosis treatment comprises a therapeutically effective amount of a Clustered Regularly Interspaced Short Palindromic Repeats (CRISPR) gene-editing system, the system comprising an RNA-guided nuclease or a nucleic acid encoding an RNA-guided nuclease and at least one guide RNA or a nucleic acid encoding at least one guide RNA targeting a gene for: (i) one or more growth factors or growth factor receptors (e.g., FGF2, CCN2, NGF, NTF3, NTF4, BDNF, FGFR1, NGFR, NTRK1, or NTRK2), (ii) one or more metalloproteases or regulators thereof (e.g., ADAM17, ADAMTS1, ADAMTS5, MMP1, MMP2, MMP3, MMP7, MMP8, MMP10, MMP12, MMP13, TIMP1, or TIMP3), (iii) one or more cytokines, chemokines or cytokine/chemokine receptors (e.g., CXCL1, CXCL2, CXCL3, CXCL5, CXCL6, CXCL8, CCL2, CCL3, CCL5, CCL7, CCL20, IL1A, IL1B, IL4, IL6, IL6ST, IL10, IL13, IL17A, IL18, TNF, CXCR1, CXCR2, CCR7, TNFRSF1A, TNFRSF1B, IL1R1, IL1RAP, IL4R, IL6R, IL10RA, IL10RB, IL13RA1, IL13RA2, IL17RA, IL18R1, or IL18RAP), (iv) one or more regulators of neuronal signaling (e.g., SCN1A, SCN2A, SCN3A, SCN4A, SCN5A, SCN8A, SCN9A, SCN10A, SCN11A, TAC1, TAC3, TACR1, TACR2, TACR3, or ATP1A1), (v) one or more other regulators of cell signaling (e.g., CALCA, CALCB, CALCRL, RAMP1, ADM, CRCP, YAP1, MRGPRX2), or (vi) a combination of any genes of (i)-(v) to ameliorate pain in a mammal, e.g., a human, dog, horse, or cat.

### K. Spinal Stenosis

[0279] In one aspect, the present disclosure encompasses treatments for spinal stenosis. In some embodiments, the spinal stenosis treatment comprises a therapeutically effective amount of a Clustered Regularly Interspaced Short Palindromic Repeats (CRISPR) gene-editing system, the system comprising an RNA-guided nuclease or a nucleic acid encoding an RNA-guided nuclease and at least one guide RNA or a nucleic acid encoding at least one guide RNA targeting a gene for: (i) one or more growth factors or growth factor receptors (e.g., FGF2, CCN2, NGF, NTF3, NTF4, BDNF, FGFR1, NGFR, NTRK1, or NTRK2), (ii) one or more metalloproteases or regulators thereof (e.g., ADAM17, ADAMTS1, ADAMTS5, MMP1, MMP2, MMP3, MMP7, MMP8, MMP10, MMP12, MMP13, TIMP1, or TIMP3), (iii) one or more cytokines, chemokines or cytokine/chemokine receptors (e.g., CXCL1, CXCL2, CXCL3, CXCL5, CXCL6, CXCL8, CCL2, CCL3, CCL5, CCL7, CCL20, IL1A, IL1B, IL4, IL6, IL6ST, IL10, IL13, IL17A, IL18, TNF, CXCR1, CXCR2, CCR7, TNFRSF1A, TNFRSF1B, IL1R1, IL1RAP, IL4R, IL6R, IL10RA, IL10RB, IL13RA1, IL13RA2, IL17RA, IL18R1, or IL18RAP), (iv) one or more regulators of neuronal signaling (e.g., SCN1A, SCN2A, SCN3A, SCN4A, SCN5A, SCN8A, SCN9A, SCN10A, SCN11A, TAC1, TAC3, TACR1, TACR2, TACR3, or ATP1A1), (v) one or more other regulators of cell signaling (e.g., CALCA, CALCB, CALCRL, RAMP1, ADM, CRCP, YAP1, MRGPRX2), or (vi) a combination of any genes of (i)-(v) to ameliorate pain in a mammal, e.g., a human, dog, horse, or cat.

### V. Delivery

### A. Viral Vectors

[0280] In one aspect, the present disclosure encompasses methods of delivery of a CRISPR gene-editing system targeting a gene for: (i) one or more growth factors or growth factor receptors (e.g., FGF2, CCN2, NGF, NTF3, NTF4, BDNF, FGFR1, NGFR, NTRK1, or NTRK2), (ii) one or more metalloproteases or regulators thereof (e.g., ADAM17, ADAMTS1, ADAMTS5, MMP1, MMP2, MMP3, MMP7, MMP8, MMP10, MMP12, MMP13, TIMP1, or TIMP3), (iii) one or more cytokines, chemokines or cytokine/chemokine receptors (e.g., CXCL1, CXCL2, CXCL3, CXCL5, CXCL6, CXCL8, CCL2, CCL3, CCL5, CCL7, CCL20, IL1A, IL1B, IL4, IL6, IL6ST, IL10, IL13, IL17A, IL18, TNF, CXCR1, CXCR2, CCR7, TNFRSF1A, TNFRSF1B, IL1R1, IL1RAP, IL4R, IL6R, IL10RA, IL10RB, IL13RA1, IL13RA2, IL17RA, IL18R1, or IL18RAP), (iv) one or more regulators of neuronal signaling (e.g., SCN1A, SCN2A, SCN3A, SCN4A, SCN5A, SCN8A, SCN9A, SCN10A, SCN11A, TAC1, TAC3, TACR1, TACR2, TACR3, or ATP1A1), (v) one or more other regulators of cell signaling (e.g., CALCA, CALCB, CALCRL, RAMP1, ADM, CRCP, YAP1, MRGPRX2), or (vi) a combination of any genes of (i)-(v) using one or more recombinant viral particle.

[0281] In some embodiments, the one of more viral vectors comprise a recombinant virus selected from a retrovirus, an adenovirus, an adeno-associated virus, a lentivirus, and a herpes simplex virus-1. In some embodiments, the one of more viral vectors comprise a recombinant adeno-associated virus (AAV). In some embodiments, the recombinant AAV is of serotype 5 (AAV5). In some embodiments, the recombinant AAV is of serotype 6 (AAV6). In some embodiments, the one or more viral vectors comprise: a first viral vector comprising a first nucleic acid, in the one or more nucleic acids, encoding the Cas protein; and a second viral vector comprising a second nucleic acid, in the one or more nucleic acids, encoding the at least one guide RNA. In some embodiments, the one or more viral vectors comprise a viral vector comprising a single nucleic acid, wherein the single nucleic acid encodes the Cas9 protein and the at least one guide RNA.

### 1. Adeno-Associated Virus (AAV)

[0282] A viral vector system useful for delivery of nucleic acids is the adeno-associated virus (AAV). Adeno-associated virus is a naturally occurring defective virus that requires another virus, such as an adenovirus or a herpes virus, as a helper virus for efficient replication and a productive life cycle. For a review see Muzyczka et al., Curr. Topics in Micro. and Immunol. 158:97-129 (1992). It is also one of the few viruses that may integrate its DNA into non-dividing cells, and exhibits a high frequency of stable integration (see for example Flotte et al., Am. J. Respir. Cell. Mol. Biol. 7:349-356 (1992); Samulski et al., J. Virol. 63:3822-3828 (1989); and McLaughlin et al., J. Virol. 62:1963-1973 (1989). Vectors containing as little as 300 base pairs of AAV can be packaged and can integrate. Space for exogenous DNA is limited to about 4.5 kb. An AAV vector such as that described in Tratschin et al., Mol. Cell. Biol. 5:3251-3260 (1985) can be used to introduce DNA into cells. A variety of nucleic acids have been introduced into different cell types using AAV vectors (see for example Hermonat et al., Proc. Natl. Acad. Sci. USA 81:6466-6470 (1984); Tratschin et al., Mol. Cell. Biol. 4:2072-2081 (1985); Wondisford et al., Mol. Endocrinol. 2:32-39 (1988); Tratschin et al., J. Virol. 51:611-619 (1984); and Flotte et al., J. Biol. Chem. 268:3781-3790 (1993). The identification of Staphylococcus aureus (SaCas9) and other smaller Cas9 enzymes that can be packaged into adeno-associated viral (AAV) vectors that are highly stable and effective in vivo, easily produced, approved by FDA, and tested in multiple clinical trials, paves new avenues for therapeutic gene editing.

[0283] According to particular embodiments, a CRISPR gene-editing system targeting a gene for: (i) one or more growth factors or growth factor receptors (e.g., FGF2, CCN2, NGF, NTF3, NTF4, BDNF, FGFR1, NGFR, NTRK1, or NTRK2), (ii) one or more metalloproteases or regulators thereof (e.g., ADAM17, ADAMTS1, ADAMTS5, MMP1, MMP2, MMP3, MMP7, MMP8, MMP10, MMP12, MMP13, TIMP1, or TIMP3), (iii) one or more cytokines, chemokines or cytokine/chemokine receptors (e.g., CXCL1, CXCL2, CXCL3, CXCL5, CXCL6, CXCL8, CCL2, CCL3, CCL5, CCL7, CCL20, IL1A, IL1B, IL4, IL6, IL6ST, IL10, IL13, IL17A, IL18, TNF, CXCR1, CXCR2, CCR7, TNFRSF1A, TNFRSF1B, IL1R1, IL1RAP, IL4R, IL6R, IL10RA, IL10RB, IL13RA1, IL13RA2, IL17RA, IL18R1, or IL18RAP), (iv) one or more regulators of neuronal signaling (e.g., SCN1A, SCN2A, SCN3A, SCN4A, SCN5A, SCN8A, SCN9A, SCN10A, SCN11A, TAC1, TAC3, TACR1, TACR2, TACR3, or ATP1A1), (v) one or more other regulators of cell signaling (e.g., CALCA, CALCB, CALCRL, RAMP1, ADM, CRCP, YAP1, MRGPRX2), or (vi) a combination of any genes of (i)-(v) comprise a recombinant AAV vector. In some embodiments, the CRISPR gene-editing system is encoded by a nucleic acid, wherein the nucleic acid is a recombinant AAV genome. In some embodiments, the AAV vector is selected from an AAV1 vector, an AAV2 vector, an AAV3 vector, an AAV4 vector, an AAV5 vector, an AAV6 vector, an AAV7 vector, an AAV8 vector, an AAV9 vector, and an AAV10 vector.

[0284] In some aspects, the AAV vector comprises a serotype selected from the group consisting of AAV1, AAV1(Y705+731F+T492V), AAV2(Y444+500+730F+T491V), AAV3(Y705+731F), AAV4, AAV5, AAV5(Y436+693+719F), AAV6, AAV6 (VP3 variant Y705F/Y731F/T492V), AAV-7m8, AAV8, AAV8(Y733F), AAV9, AAV9 (VP3 variant Y731F), AAV10(Y733F), AAV-ShH10, and AAV-DJ/8. In some aspects, the AAV vector comprises a serotype selected from the group consisting of: AAV1, AAV5, AAV6, AAV6 (Y705F/Y731F/T492V), AAV8, AAV9, and AAV9 (Y731F).

[0285] In one aspect, use of the CRISPR gene-editing system further comprising one or more AAV vectors is therapeutic. In some embodiments, use of the system treats one or more spinal conditions or disorders. In some embodiments, the condition or disorder is low back pain. In some embodiments, the condition or disorder is neck pain. In some embodiments, such conditions or disorders include disorders of the intervertebral discs (IVDs). In some embodiments, the condition or disorder is DDD. In some embodiments, the condition or disorder is a tear in the annulus fibrosis (annular ligament tear). In some embodiments, the condition or disorder is a herniation of the nucleous pulposus (HNP) or herniated disc. In some embodiments, the condition or disorder is arthritis of the facet joints of the spine. In some embodiments, the condition or disorder is spondylosis. In some embodiments, the condition or disorder is painful scoliosis. In some embodiments, the condition or disorder is spinal stenosis.

### 2. Lentivirus

[0286] In some aspects, the viral vector is a lentivirus. In an aspect, the lentivirus is selected from the group consisting of: human immunodeficiency-1 (HIV-1), human immunodeficiency-2 (HIV-2), simian immunodeficiency virus (SIV), feline immunodeficiency virus (FIV), bovine immunodeficiency virus (BIV), Jembrana Disease Virus (JDV), equine infectious anemia virus (EIAV), and caprine arthritis encephalitis virus (CAEV).

[0287] Lentiviral transduction systems are known in the art and are described, e.g., in Levine, et al., Proc. Nat'l Acad. Sci. 2006, 103, 17372-77; Zufferey, et al., Nat. Biotechnol. 1997, 15, 871-75; Dull, et al., J. Virology 1998, 72, 8463-71, and U.S. Pat. No. 6,627,442, the disclosures of each of which are incorporated by reference herein.

[0288] In one aspect, use of the CRISPR gene-editing system further comprising one or more lentiviral vectors is therapeutic. In some embodiments, use of the system treats one or more spinal conditions or disorders. In some embodiments, the condition or disorder is low back pain. In some embodiments, the condition or disorder is neck pain. In some embodiments, such conditions or disorders include disorders of the intervertebral discs (IVDs). In some embodiments, the condition or disorder is DDD. In some embodiments, the condition or disorder is a tear in the annulus fibrosis (annular ligament tear). In some embodiments, the condition or disorder is a herniation of the nucleous pulposus (HNP) or herniated disc. In some embodiments, the condition or disorder is arthritis of the facet joints of the spine. In some embodiments, the condition or disorder is spondylosis. In some embodiments, the condition or disorder is painful scoliosis. In some embodiments, the condition or disorder is spinal stenosis.

### B. Lipid Nanoparticles (LNP)

[0289] In some embodiments, a CRISPR gene-editing system is delivered by a nanoparticle. Without wishing to be bound by any particular theory, in certain embodiments, nucleic acids, when present in the nanoparticle, are resistant in aqueous solution to degradation with a nuclease. In other embodiments, proteins are protected from protease degradation. In some embodiments, proteins and nucleic acids encapsulated by nanoparticles are capable of penetrating the cellular plasma membrane.

[0290] Lipid nanoparticles comprising nucleic acids and their method of preparation is disclosed in at least WO2017/019935, WO2017/049074, WO2017/201346, WO2017/218704, WO2018/006052, WO2018/013525, WO2018/089540, WO2018/119115, WO2018/126084, WO2018/157009, WO2018/170336, WO2018/222890, WO2019/046809, WO2019/089828, WO2020/061284, WO2020/061317, WO2020/081938, WO2020/097511, WO2020/097520, WO2020/097540, WO2020/097548, WO2020/214946, WO2020/219941, WO2020/232276, WO2020/227615, WO2020/061295, WO2021/007278, WO2021/016430, WO2021/021988, EP Patent No. EP 2 972 360, US20200155691, US20200237671, U.S. Pat. Nos. 8,058,069, 8,492,359, 8,822,668, 9,364,435, 9,404,127, 9,504,651, 9,593,077, 9,738,593, 9,868,691, 9,868,692, 9,950,068, 10,138,213, 10,166,298, 10,221,127, 10,238,754, 10,266,485, 10,383,952, 10,730,924, 10,766,852, 11,079,379, 11,141,378 and 11,246,933, which are incorporated herein by reference in their entirety for all purposes.

### Lipid Nanoparticle Compositions

[0291] In some embodiments, the largest dimension of a nanoparticle composition is 1 micrometer or shorter (e.g., 1 micrometer, 900 nm, 800 nm, 700 nm, 600 nm, 500 nm, 400 nm, 300 nm, 200 nm, 175 nm, 150 nm, 125 nm, 100 nm, 75 nm, 50 nm, or shorter), e.g., when measured by dynamic light scattering (DLS), transmission electron microscopy, scanning electron microscopy, or another method. Nanoparticle compositions include, for example, lipid nanoparticles (LNPs), liposomes, lipid vesicles, and lipoplexes. In some embodiments, nanoparticle compositions are vesicles including one or more lipid bilayers. In certain embodiments, a nanoparticle composition includes two or more concentric bilayers separated by aqueous compartments. Lipid bilayers may be functionalized and/or crosslinked to one another. Lipid bilayers may include one or more ligands, proteins, or channels. In various embodiments, lipid nanoparticles described herein have a mean diameter of from about 30 nm to about 150 nm, from about 40 nm to about 150 nm, from about 50 nm to about 150 nm, from about 60 nm to about 130 nm, from about 70 nm to about 110 nm, from about 70 nm to about 100 nm, from about 80 nm to about 100 nm, from about 90 nm to about 100 nm, from about 70 nm to about 90 nm, from about 80 nm to about 90 nm, from about 70 nm to about 80 nm, or about 30 nm, 35 nm, 40 nm, 45 nm, 50 nm, 55 nm, 60 nm, 65 nm, 70 nm, 75 nm, 80 nm, 85 nm, 90 nm, 95 nm, 100 nm, 105 nm, 110 nm, 115 nm, 120 nm, 125 nm, 130 nm, 135 nm, 140 nm, 145 nm, or 150 nm, and are substantially non-toxic.

[0292] In certain embodiments, the lipid nanoparticles described herein comprise one or more components, including a lipid component, and (optionally) a structural component. The lipid component comprises lipids selected from ionizable and/or cationic lipids (i.e., lipids that may have a positive or partial positive charge at physiological pH), neutral lipids (e.g., phospholipids, or sphingolipids), and polymer-conjugated lipids (e.g., PEGylated lipids). In some embodiments, the lipid component comprises a single ionizable lipid. In other embodiments, the lipid component comprises 2, 3, 4, 5, 6, 7, 8, 9, 10, 15, or 20 ionizable lipids. In some embodiments, the lipid component comprises a single neutral lipid. In other embodiments, the lipid component comprises 2, 3, 4, 5, 6, 7, 8, 9, 10, 15, or 20 neutral lipids. In some embodiments, the lipid com-ponent comprises a single polymer-conjugated lipid. In other embodiments, the lipid component comprises 2, 3, 4, 5, 6, 7, 8, 9, 10, 15, or 20 polymer-conjugated lipids. In some embodiments, the structural component comprises a single structural lipid. In other embodiments, the structural component comprises 2, 3, 4, 5, 6, 7, 8, 9, 10, 15, or 20 structural lipids. In some embodiments, the lipid component comprises at least one cationic lipid, at least one neutral lipid, and at least one polymer-conjugated lipid. The present disclosure contemplates that the lipid component may comprise any combination of the foregoing constituents.

### Ionizable/Cationic Lipids

[0293] In some embodiments, the lipid component comprises an ionizable lipid. In some embodiments, the ionizable lipid is anionic. In other embodiments, the ionizable lipid is a cationic lipid. In some embodiments, the lipid component comprises cationic lipids including, but not limited to, a cationic lipid selected from the group consisting of 3-(didodecylamino)-N1,N1,4-tridodecyl-1-piperazineethanamine (KL10), N1-[2-(didodecylamino)ethyl]-N1,N4,N4-tridodecyl-1,4-piperazinediethanamine (KL22), 14,25-ditridecyl-15,18,21,24-tetraaza-octatriacontane (KL25), 1,2-dilinoleyloxy-N,N-dimethylaminopropane (DLin-DMA), 2,2-dilinoleyl-4-dimethylaminomethyl-[1,3]-dioxolane (DLin-K-DMA), heptatriaconta-6,9,28,31-tetraen-19-yl 4-(dimethylamino)butanoate (DLin-MC3-DMA), 2,2-dilinoleyl-4-(2-dimethylaminoethyl)-[1,3]-dioxolane (DLin-KC2-DMA), 1,2-dioleyloxy-N,N-dimethylaminopropane (DODMA), 2-({8-[(3.beta.)-cholest-5-en-3-yloxy]octyl}oxy)-N,N-dimethyl-3-[(9Z,12Z)-octadeca-9,12-dien-1-yloxy]propan-1-amine (Octyl-CLinDMA), (2R)-2-({8-[(3.beta.)-cholest-5-en-3-yloxy]octyl}oxy)-N,N-dimethyl-3-[(9Z-,12Z)-octadeca-9,12-dien-1-yloxy]propan-1-amine (Octyl-CLinDMA (2R)), (2S)-2-({8-[(3.beta.)-cholest-5-en-3-yloxy]octyl}oxy)-N,N-dimethyl-3-[(9Z-,12Z)-octadeca-9,12-dien-1-yloxy]propan-1-amine (Octyl-CLinDMA (2S)), a lipid including a cyclic amine group, SM-102, LP01 and mixtures thereof.

[0294] Non-exhaustive and non-limiting examples of cationic lipids include:

[chemical structure]

[chemical structure]

[chemical structure]

[chemical structure]

[chemical structure]

### Neutral Lipids/Phospholipids

[0295] In some embodiments, the lipid component further comprises neutral lipids including, but not limited to, a phospholipid selected from the group consisting of 1,2-dilinoleoyl-sn-glycero-3-phosphocholine (DLPC), 1,2-dimyristoyl-sn-glycero-phosphocholine (DMPC), 1,2-dioleoyl-sn-glycero-3-phosphocholine (DOPC), 1,2-dipalmitoyl-sn-glycero-3-phosphocholine (DPPC), 1,2-distearoyl-sn-glycero-3-phosphocholine (DSPC), 1,2-diundecanoyl-sn-glycero-phosphocholine (DUPC), 1-palmitoyl-2-oleoyl-sn-glycero-3-phosphocholine (POPC), 1,2-di-O-octadecenyl-sn-glycero-3-phosphocholine (18:0 Diether PC), 1-oleoyl-2-cholesterylhemisuccinoyl-sn-glycero-3-phosphocholine (OChemsPC), 1-hexadecyl-sn-glycero-3-phosphocholine (C16 Lyso PC), 1,2-dilinolenoyl-sn-glycero-3-phosphocholine, 1,2-diarachidonoyl-sn-glycero-3-phosphocholine, 1,2-didocosahexaenoyl-sn-glycero-3-phosphocholine, 1,2-dioleoyl-sn-glycero-3-phosphoethanolamine (DOPE), 1,2-diphytanoyl-sn-glycero-3-phosphoethanolamine (ME 16.0 PE), 1,2-distearoyl-sn-glycero-3-phosphoethanolamine, 1,2-dilinoleoyl-sn-glycero-3-phosphoethanolamine, 1,2-dilinolenoyl-sn-glycero-3-phosphoethanolamine, 1,2-diarachidonoyl-sn-glycero-3-phosphoethanolamine, 1,2-didocosahexaenoyl-sn-glycero-3-phosphoethanolamine, 1,2-dioleoyl-sn-glycero-3-phospho-rac-(1-glycerol) sodium salt (DOPG), sphingomyelin (SM), and mixtures thereof.

### Polymer-Conjugated Lipids

[0296] In some embodiments, the lipid component further comprises polymer-conjugated lipids, including, but not limited to, a PEGylated lipid selected from the group consisting of PEG-modified phosphatidylethanolamines, PEG-modified phosphatidic acids, PEG-modified ceramides, PEG-modified dialkylamines, PEG-modified diacylglycerols, PEG-modified dialkylglycerols, and mixtures thereof. For example, a PEG lipid may be PEG-c-DOMG, PEG-DMG, PEG₂₀₀₀-c-DMG, PEG-DLPE, PEG-DMPE, PEG-DPPC, PEG-DMA or a PEG-DSPE lipid.

[0297] Non-exhaustive and non-limiting examples of PEG lipids include:

[chemical structure]

[chemical structure]

[chemical structure]

### Structural Lipids/Sterols

[0298] In some embodiments, the LNP further comprises a structural component. See generally Patel, S., et al. (2020). Nature Communications, 11(1), 1-13. In some embodiments, the structural component comprises a sterol including, but not limited to, a sterol selected from the group consisting of cholesterol, fecosterol, stigmasterol, stigmastanol, sitosterol, β-sitosterol, lupeol, betulin, ursolic acid, oleanolic acid, campesterol, fucosterol, brassicasterol, ergosterol, 9, 11-dehydroergosterol, tomatidine, tomatine, α-tocopherol, and mixtures thereof. In other embodiments, the structural lipid includes cholesterol and a corticosteroid (e.g., prednisolone, dexamethasone, prednisone, and hydrocortisone), or a combination thereof.

[0299] Non-exhaustive and non-limiting examples of structural lipids include: lipids comprise about 1, 2, 3, 4, 5, 6, 7, 8, 9, 10, 11, 12, 13, 14, 15, 16, 17, 18, 19, 20, 25, or 30 mol % of the lipid component.

[0300] In some embodiments, the polymer-conjugated lipids comprise between about 0 and about 15 mol % of the lipid component. In other embodiments, the polymer-conjugated lipids comprise between about 0.5 and about 10 mol % of the lipid component. In various embodiments, the polymer-conjugated lipids comprise about 0.5, 1, 1.5, 2, 2.5, 3, 3.5, 4, 4.5, 5, 5.5, 6, 6.5, 7, 7.5, 8, 8.5 9, 9.5, 10, or 15 mol % of the lipid component.

[0301] In some embodiments, the structural component comprises about 17.5 mol % to about 50 mol % of the lipid component. In other embodiments, the structural component comprises about 30 to about 40 mol % of the lipid component. In various embodiments, the structural component comprises about 17.5, 20, 22.5, 25, 27.5, 30, 31, 32, 33, 34, 35, 36, 37, 38, 39, 40, 41, 42, 43, 44, 45, 46, 47, 48, 49, or 50 mol % of the lipid component.

[0302] The structural component may alternatively be expressed as a ratio relative to the lipid component. In some embodiments, the structural component is in a ratio of about 1:1 with the lipid component (sterol:lipids). In other embodiments, the structural component is in a ratio of about 1:5 with the lipid component (sterol:lipids). In various embodiments, the structural component is in a ratio of about 1:1, 1:2, 1:3, 1:4,1:5, 1:6, 1:7, 1:8, 1:9, 1:10, 1:15, 1:20, or 1:25 with the lipid component (sterol:lipids).

[0303] Nanoparticle compositions may be designed for one or more specific applications or targets. For example, a nanoparticle composition may be designed to deliver a therapeutic and/or prophylactic such as an RNA to a particular cell, tissue, organ, or system or group thereof in a mammal's body. Physiochemical properties of nanoparticle compositions may be altered in order to increase selectivity for particular bodily targets. For instance, particle sizes may be adjusted based on the fenestration sizes of different organs. The therapeutic and/or prophylactic included in a nanoparticle composition may also be selected based on the desired delivery target or targets. For example, a therapeutic and/or prophylactic may be selected for a particular indication, condition, disease, or disorder and/or for delivery to a particular cell, tissue, organ, or system or group thereof (e.g., localized or specific delivery). In certain embodiments, a nanoparticle composition may include an mRNA encoding a polypeptide of interest capable of being translated within a cell to produce the polypeptide of interest. Such a composition may be designed to be specifically delivered to a particular organ. In some embodiments, a composition may be de-signed to be specifically delivered to a mammalian joint.

[0304] The amount of a therapeutic and/or prophylactic in a nanoparticle composition may depend on the size, composition, desired target and/or application, or other properties of the nanoparticle composition as well as on the properties of the therapeutic and/or prophylactic. For example, the amount of an RNA useful in a nanoparticle composition may depend on the size, sequence, and other characteristics of the RNA. The relative amounts of a therapeutic and/or prophylactic and other elements (e.g., lipids) in a nanoparticle composition may also vary. In some embodiments, the wt/wt ratio of the lipid component to a therapeutic and/or prophylactic in a nanoparticle composition may be from about 5:1 to about 60:1, such as 5:1, 6:1, 7:1, 8:1, 9:1, 10:1, 11:1, 12:1, 13:1, 14:1, 15:1, 16:1, 17:1, 18:1, 19:1, 20:1, 25:1, 30:1, 35:1, 40:1, 45:1, 50:1, and 60:1. For example, the wt/wt ratio of the lipid component to a therapeutic and/or prophylactic may be from about 10:1 to about 40:1. In certain embodiments, the wt/wt ratio is about 20:1. The amount of a therapeutic and/or prophylactic in a nanoparticle composition may, for example, be measured using absorption spectroscopy (e.g., ultraviolet-visible spectroscopy).

[0305] In some embodiments, the therapeutic and/or prophylactic comprises a nucleic acid component. In some embodiments, the nucleic acid component comprises RNA including, but not limited to, RNA selected from the group consisting of messenger RNA (mRNA), CRISPR RNA (crRNA), tracrRNA, single-guide RNA (sgRNA), short interfering RNA (siRNA), antisense oligonucleotides (ASO), and mixtures thereof. In other embodiments, the nucleic acid component comprises DNA including, but not limited to, DNA selected from the group consisting of linear DNA, plasmid DNA, antisense oligonucleotide, and mixtures thereof.

[0306] In some embodiments, a nanoparticle composition includes one or more RNAs, and the one or more RNAs, lipids, and amounts thereof may be selected to provide a specific N:P ratio. The N:P ratio of the composition refers to the molar ratio of nitrogen atoms in one or more lipids to the number of phosphate groups in an RNA. In general, a lower N:P ratio is preferred. The one or more RNA, lipids, and amounts thereof may be selected to provide an N:P ratio from about 2:to about 30:1, such as 2:1, 3:1, 4:1, 5:1, 6:1, 7:1, 8:1, 9:1, 10:1, 12:1, 14:1, 16:1, 18:1, 20:1, 22:1, 24:1, 26:1, 28:1, or 30:1. In certain embodiments, the N:P ratio may be from about 2:1 to about 8:1. In other embodiments, the N:P ratio is from about 5:1 to about 8:1. For example, the N:P ratio may be about 5.0:1, about 5.5:1, about 5.67:1, about 6.0:1, about 6.5:1, or about 7.0:1. For example, the N:P ratio may be about 5.67:1.

[0307] In some embodiments, the nucleic acid component is comprised of a modified nucleic acid. For example, an RNA may be a modified RNA. That is, an RNA may include one or more nucleobases, nucleosides, nucleotides, or linkers that are non-naturally occurring. A “modified” species may also be referred to herein as an “altered” species. Species may be modified or altered chemically, structurally, or functionally. For example, a modified nucleobase species may include one or more substitutions that are not naturally occurring.

[0308] In certain embodiments, the present disclosure comprises methods for treating back or spine conditions or disorders. In other embodiments, the present disclosure comprises methods for treating discogenic disorders. In some embodiments, the present disclosure comprises methods for treating localized nociception, inflammation, or morphological changes associated with back or spine conditions or disorders in a subject in need thereof, the method comprising administering a therapeutically effective amount of a CRISPR-Cas composition encapsulated within or associated with a lipid nanoparticle (LNP), wherein the composition comprises one or more non-naturally occurring polynucleotides encoding a Cas9 protein and at least one sgRNA. In some embodiments, LNPs are administered intradiscally. In other embodiments, LNPs are administered epidurally. In some embodiments, LNPs are administered peridiscally. In some embodiments, LNPs are administered perivertebrally.

### Physical Properties

[0309] The characteristics of a nanoparticle composition may depend on the components thereof. For example, a nanoparticle composition including cholesterol as a structural lipid may have different characteristics than a nanoparticle composition that includes a different structural lipid. Similarly, the characteristics of a nanoparticle composition may depend on the absolute or relative amounts of its components. For instance, a nanoparticle composition including a higher molar fraction of a phospholipid may have different characteristics than a nanoparticle composition including a lower molar fraction of a phospholipid. Characteristics may also vary depending on the method and conditions of preparation of the nanoparticle composition.

[0310] Nanoparticle compositions may be characterized by a variety of methods. For example, microscopy (e.g., transmission electron microscopy or scanning electron microscopy) may be used to examine the morphology and size distribution of a nanoparticle composition. Dynamic light scattering or potentiometry (e.g., potentiometric titrations) may be used to measure zeta potentials. Dynamic light scattering may also be utilized to determine particle sizes. Instruments such as the Zetasizer Nano ZS (Malvern Instruments Ltd, Malvern, Worcestershire, UK) may also be used to measure multiple characteristics of a nanoparticle composition, such as particle size, polydispersity index, and zeta potential.

[0311] The mean size of a nanoparticle composition may be between 10 nm and 1 micrometer, e.g., measured by dynamic light scattering (DLS). For example, the mean size may be from about 40 nm to about 150 nm, such as about 40 nm, 45 nm, 50 nm, 55 nm, 60 nm, 65 nm, 70 nm, 75 nm, 80 nm, 85 nm, 90 nm, 95 nm, 100 nm, 105 nm, 110 nm, 115 nm, 120 nm, 125 nm, 130 nm, 135 nm, 140 nm, 145 nm, or 150 nm. In some embodiments, the mean size of a nanoparticle composition may be from about 50 nm to about 100 nm, from about 50 nm to about 90 nm, from about 50 nm to about 80 nm, from about 50 nm to about 70 nm, from about 50 nm to about 60 nm, from about 60 nm to about 100 nm, from about 60 nm to about 90 nm, from about 60 nm to about 80 nm, from about 60 nm to about 70 nm, from about 70 nm to about 100 nm, from about 70 nm to about 90 nm, from about 70 nm to about 80 nm, from about 80 nm to about 100 nm, from about 80 nm to about 90 nm, or from about 90 nm to about 100 nm. In certain embodiments, the mean size of a nanoparticle composition may be from about 70 nm to about 100 nm. In a particular embodiment, the mean size may be about 80 nm. In other embodiments, the mean size may be about 100 nm.

[0312] A nanoparticle composition may be relatively homogenous. A polydispersity index may be used to indicate the homogeneity of a nanoparticle composition, e.g., the particle size distribution of the nanoparticle compositions. A small (e.g., less than 0.3) polydispersity index generally indicates a narrow particle size distribution. A nanoparticle composition may have a polydispersity index from about 0 to about 0.25, such as 0.01, 0.02, 0.03, 0.04, 0.05, 0.06, 0.07, 0.08, 0.09, 0.10, 0.11, 0.12, 0.13, 0.14, 0.15, 0.16, 0.17, 0.18, 0.19, 0.20, 0.21, 0.22, 0.23, 0.24, or 0.25. In some embodiments, the polydispersity index of a nanoparticle composition may be from about 0.10 to about 0.20.

[0313] The zeta potential of a nanoparticle composition may be used to indicate the electrokinetic potential of the composition. For example, the zeta potential may describe the surface charge of a nanoparticle composition. Nanoparticle compositions with relatively low charges, positive or negative, are generally desirable, as more highly charged species may interact undesirably with cells, tissues, and other elements in the body. In some embodiments, the zeta potential of a nanoparticle composition may be from about −10 mV to about +20 mV, from about −10 mV to about +15 mV, from about −10 mV to about +10 mV, from about −10 mV to about +5 mV, from about −10 mV to about 0 mV, from about −10 mV to about −5 mV, from about −5 mV to about +20 mV, from about −5 mV to about +15 mV, from about −5 mV to about +10 mV, from about −5 mV to about +5 mV, from about −5 mV to about 0 mV, from about 0 mV to about +20 mV, from about 0 mV to about +15 mV, from about 0 mV to about +10 mV, from about 0 mV to about +5 mV, from about +5 mV to about +20 mV, from about +5 mV to about +15 mV, or from about +5 mV to about +10 mV.

[0314] The efficiency of encapsulation of a therapeutic and/or prophylactic describes the amount of therapeutic and/or prophylactic that is encapsulated or otherwise associated with a nanoparticle composition after preparation, relative to the initial amount provided. The encapsulation efficiency is desirably high (e.g., close to 100%). The encapsulation efficiency may be measured, for example, by comparing the amount of therapeutic and/or prophylactic in a solution containing the nanoparticle composition before and after breaking up the nanoparticle composition with one or more organic solvents or detergents. Fluorescence may be used to measure the amount of free therapeutic and/or prophylactic (e.g., RNA) in a solution. For the nanoparticle compositions described herein, the encapsulation efficiency of a therapeutic and/or prophylactic may be at least 50%, for example 50%, 55%, 60%, 65%, 70%, 75%, 80%, 85%, 90%, 91%, 92%, 93%, 94%, 95%, 96%, 97%, 98%, 99%, or 100%. In some embodiments, the encapsulation efficiency may be at least 80%. In certain embodiments, the encapsulation efficiency may be at least 90%.

[0315] A nanoparticle composition may optionally comprise one or more coatings. For example, a nanoparticle composition may be formulated in a capsule, film, or tablet having a coating. A capsule, film, or tablet including a composition described herein may have any useful size, tensile strength, hardness, or density.

[0316] Unless otherwise defined, all technical and scientific terms used herein have the same meaning as commonly understood by one of ordinary skill in the art to which this disclosure belongs. Although methods and materials similar or equivalent to those described herein may be used in the practice or testing of the present disclosure, suitable methods and materials are described below. All publications, patent applications, patents, and other references mentioned herein are incorporated by reference in their entirety. In addition, the materials, methods, and examples are illustrative only and not intended to be limiting.

[0317] In some embodiments, the CRISPR gene-editing system comprises one or more RNA-containing compositions. In some embodiments, the CRISPR gene-editing system further comprises one or more nanoparticles. In some embodiments, said one or more RNA-containing compositions comprises a guide RNA. In some embodiments, said one or more RNA-containing compositions comprises an mRNA. In some embodiments, said one or more RNA-containing compositions comprises an RNP (e.g., Cas9 and a guide RNA). In some embodiments, said one or more nanoparticles are lipid nanoparticles (LNP).

[0318] In some embodiments, the CRISPR gene-editing system comprises one or more LNPs collectively encapsulating (i) the RNA-guided nuclease or the nucleic acid encoding the RNA-guided nuclease and (ii) the at least one guide RNA or the nucleic acid encoding the at least one guide RNA. In some embodiments, the one or more LNPs comprises a first plurality of LNP encapsulating the RNA-guided nuclease or a nucleic acid encoding an RNA-guided nuclease and a second plurality of LNP encapsulating the at least one guide RNA or a nucleic acid encoding at least one guide RNA.

[0319] In some embodiments, the one or more LNP comprises a component selected from the group consisting of 3-(didodecylamino)-N1,N1,4-tridodecyl-1-piperazineethanamine (KL10), N1-[2-(didodecylamino)ethyl]-N1,N4,N4-tridodecyl-1,4-piperazinediethanamine (KL22), 14,25-ditridecyl-15,18,21,24-tetraaza-octatriacontane (KL25), 1,2-dilinoleyloxy-N,N-dimethylaminopropane (DLin-DMA), 2,2-dilinoleyl-4-dimethylaminomethyl-[1,3]-dioxolane (DLin-K-DMA), heptatriaconta-6,9,28,31-tetraen-19-yl 4-(dimethylamino)butanoate (DLin-MC3-DMA), 2,2-dilinoleyl-4-(2-dimethylaminoethyl)-[1,3]-dioxolane (DLin-KC2-DMA), 1,2-dioleyloxy-N,N-dimethylaminopropane (DODMA), 2-({8-[(3.beta.)-cholest-5-en-3-yloxy]octyl}oxy)-N,N-dimethyl-3-[(9Z,12Z)--octadeca-9,12-dien-1-yloxy]propan-1-amine (Octyl-CLinDMA), (2R)-2-({8-[(3.beta.)-cholest-5-en-3-yloxy]octyl}oxy)-N,N-dimethyl-3-[(9Z-,12Z)-octadeca-9,12-dien-1-yloxy]propan-1-amine (Octyl-CLinDMA (2R)), (2S)-2-({8-[(3.beta.)-cholest-5-en-3-yloxy]octyl}oxy)-N,N-dimethyl-3-[(9Z-,12Z)-octadeca-9,12-dien-1-yloxy]propan-1-amine (Octyl-CLinDMA (2S)), a lipid including a cyclic amine group, and a mixture thereof.

[0320] In some embodiments, the one or more LNP comprises a component selected from the group consisting of 1,2-dilinoleoyl-sn-glycero-3-phosphocholine (DLPC), 1,2-dimyristoyl-sn-glycero-phosphocholine (DMPC), 1,2-dioleoyl-sn-glycero-3-phosphocholine (DOPC), 1,2-dipalmitoyl-sn-glycero-3-phosphocholine (DPPC), 1,2-distearoyl-sn-glycero-3-phosphocholine (DSPC), 1,2-diundecanoyl-sn-glycero-phosphocholine (DUPC), 1-palmitoyl-2-oleoyl-sn-glycero-3-phosphocholine (POPC), 1,2-di-O-octadecenyl-sn-glycero-3-phosphocholine (18:0 Diether PC), 1-oleoyl-2-cholesterylhemisuccinoyl-sn-glycero-3-phosphocholine (OChemsPC), 1-hexadecyl-sn-glycero-3-phosphocholine (C16 Lyso PC), 1,2-dilinolenoyl-sn-glycero-3-phosphocholine, 1,2-diarachidonoyl-sn-glycero-3-phosphocholine, 1,2-didocosahexaenoyl-sn-glycero-3-phosphocholine, 1,2-dioleoyl-sn-glycero-3-phosphoethanolamine (DOPE), 1,2-diphytanoyl-sn-glycero-3-phosphoethanolamine (ME 16.0 PE), 1,2-distearoyl-sn-glycero-3-phosphoethanolamine, 1,2-dilinoleoyl-sn-glycero-3-phosphoethanolamine, 1,2-dilinolenoyl-sn-glycero-3-phosphoethanolamine, 1,2-diarachidonoyl-sn-glycero-3-phosphoethanolamine, 1,2-didocosahexaenoyl-sn-glycero-3-phosphoethanolamine, 1,2-dioleoyl-sn-glycero-3-phospho-rac-(1-glycerol) sodium salt (DOPG), sphingomyelin (SM), and a mixture thereof.

[0321] In some embodiments, the one or more LNP comprises a component selected from the group consisting of PEG-modified phosphatidylethanolamines, PEG-modified phosphatidic acids, PEG-modified ceramides, PEG-modified dialkylamines, PEG-modified diacylglycerols, PEG-modified dialkylglycerols, and mixtures thereof. For example, a PEG lipid may be PEG-c-DOMG, PEG-DMG, PEG-DLPE, PEG-DMPE, PEG-DPPC, PEG-DMA, a PEG-DSPE lipid, and a mixture thereof.

[0322] In some embodiments, the one or more LNP comprises a component selected from the group consisting of a cholesterol, fecosterol, stigmasterol, stigmastanol, sitosterol, β-sitosterol, lupeol, betulin, ursolic acid, oleanolic acid, campesterol, fucosterol, brassicasterol, ergosterol, 9, 11-dehydroergosterol, tomatidine, tomatine, α-tocopherol, dexamethasone and a mixture thereof.

[0323] In some embodiments, use of the CRISPR gene-editing system further comprising one or more LNPs to target a gene for: (i) one or more growth factors or growth factor receptors (e.g., FGF2, CCN2, NGF, NTF3, NTF4, BDNF, FGFR1, NGFR, NTRK1, or NTRK2), (ii) one or more metalloproteases or regulators thereof (e.g., ADAM17, ADAMTS1, ADAMTS5, MMP1, MMP2, MMP3, MMP7, MMP8, MMP10, MMP12, MMP13, TIMP1, or TIMP3), (iii) one or more cytokines, chemokines or cytokine/chemokine receptors (e.g., CXCL1, CXCL2, CXCL3, CXCL5, CXCL6, CXCL8, CCL2, CCL3, CCL5, CCL7, CCL20, IL1A, IL1B, IL4, IL6, IL6ST, IL10, IL13, IL17A, IL18, TNF, CXCR1, CXCR2, CCR7, TNFRSF1A, TNFRSF1B, IL1R1, IL1RAP, IL4R, IL6R, IL10RA, IL10RB, IL13RA1, IL13RA2, IL17RA, IL18R1, or IL18RAP), (iv) one or more regulators of neuronal signaling (e.g., SCN1A, SCN2A, SCN3A, SCN4A, SCN5A, SCN8A, SCN9A, SCN10A, SCN11A, TAC1, TAC3, TACR1, TACR2, TACR3, or ATP1A1), (v) one or more other regulators of cell signaling (e.g., CALCA, CALCB, CALCRL, RAMP1, ADM, CRCP, YAP1, MRGPRX2), or (vi) a combination of any genes of (i)-(v) is therapeutic.

[0324] In one aspect, use of the CRISPR gene-editing system further comprising one or more LNPs is therapeutic. In some embodiments, use of the system treats one or more spinal conditions or disorders. In some embodiments, the condition or disorder is low back pain. In some embodiments, the condition or disorder is neck pain. In some embodiments, such conditions or disorders include disorders of the intervertebral discs (IVDs). In some embodiments, the condition or disorder is DDD. In some embodiments, the condition or disorder is a tear in the annulus fibrosis (annular ligament tear). In some embodiments, the condition or disorder is a hemiation of the nucleous pulposus (HNP) or herniated disc. In some embodiments, the condition or disorder is arthritis of the facet joints of the spine. In some embodiments, the condition or disorder is spondylosis. In some embodiments, the condition or disorder is painful scoliosis. In some embodiments, the condition or disorder is spinal stenosis.

### C. Virus-Like Particles

[0325] In one aspect, the present disclosure encompasses means for delivering a CRISPR gene-editing system to a mammalian cell via a virus-like particle (VLP). In some embodiments, a CRISPR gene-editing system is delivered by a VLP. Without wishing to be bound by any particular theory, in certain embodiments, nucleic acids, when present in the particle, are resistant in aqueous solution to degradation with a nuclease. In other embodiments, proteins are protected from protease degradation while present in the particle. In some embodiments, proteins and nucleic acids encapsulated by VLPs are capable of penetrating the cellular plasma membrane.

[0326] In some embodiments, the CRISPR gene-editing system comprises one or more RNA-containing compositions. In some embodiments, the CRISPR gene-editing system further comprises one or more VLPs. In some embodiments, said one or more RNA-containing compositions comprises a guide RNA. In some embodiments, said one or more RNA-containing compositions comprises an mRNA. In some embodiments, said one or more RNA-containing compositions comprises an RNP (e.g., Cas9 and a guide RNA).

[0327] In some embodiments, the CRISPR gene-editing system comprises one or more virus-like particles collectively encapsulating (i) the RNA-guided nuclease or the nucleic acid encoding the RNA-guided nuclease and (ii) the at least one guide RNA or the nucleic acid encoding the at least one guide RNA. In some embodiments, the one or more virus-like particles comprises a first plurality of virus-like particles encapsulating the RNA-guided nuclease or a nucleic acid encoding an RNA-guided nuclease and a second plurality of virus-like particles encapsulating the at least one guide RNA or a nucleic acid encoding at least one guide RNA.

[0328] In some embodiments, use of the CRISPR gene-editing system further comprising one or more LNPs to target a gene for: (i) one or more growth factors or growth factor receptors (e.g., FGF2, CCN2, NGF, NTF3, NTF4, BDNF, FGFR1, NGFR, NTRK1, or NTRK2), (ii) one or more metalloproteases or regulators thereof (e.g., ADAM17, ADAMTS1, ADAMTS5, MMP1, MMP2, MMP3, MMP7, MMP8, MMP10, MMP12, MMP13, TIMP1, or TIMP3), (iii) one or more cytokines, chemokines or cytokine/chemokine receptors (e.g., CXCL1, CXCL2, CXCL3, CXCL5, CXCL6, CXCL8, CCL2, CCL3, CCL5, CCL7, CCL20, IL1A, IL1B, IL4, IL6, IL6ST, IL10, IL13, IL17A, IL18, TNF, CXCR1, CXCR2, CCR7, TNFRSF1A, TNFRSF1B, IL1R1, IL1RAP, IL4R, IL6R, IL10RA, IL10RB, IL13RA1, IL13RA2, IL17RA, IL18R1, or IL18RAP), (iv) one or more regulators of neuronal signaling (e.g., SCN1A, SCN2A, SCN3A, SCN4A, SCN5A, SCN8A, SCN9A, SCN10A, SCN11A, TAC1, TAC3, TACR1, TACR2, TACR3, or ATP1A1), (v) one or more other regulators of cell signaling (e.g., CALCA, CALCB, CALCRL, RAMP1, ADM, CRCP, YAP1, MRGPRX2), or (vi) a combination of any genes of (i)-(v) is therapeutic.

[0329] In one aspect, use of the CRISPR gene-editing system further comprising one or more VLPs is therapeutic. In some embodiments, use of the system treats one or more spinal conditions or disorders. In some embodiments, the condition or disorder is low back pain. In some embodiments, the condition or disorder is neck pain. In some embodiments, such conditions or disorders include disorders of the intervertebral discs (IVDs). In some embodiments, the condition or disorder is DDD. In some embodiments, the condition or disorder is a tear in the annulus fibrosis (annular ligament tear). In some embodiments, the condition or disorder is a hemiation of the nucleous pulposus (HNP) or herniated disc. In some embodiments, the condition or disorder is arthritis of the facet joints of the spine. In some embodiments, the condition or disorder is spondylosis. In some embodiments, the condition or disorder is painful scoliosis. In some embodiments, the condition or disorder is spinal stenosis.

### D. Miscellaneous Modes of Delivery

### 1. Liposomes

[0330] In some embodiments, a CRISPR gene-editing system targeting a gene for: (i) one or more growth factors or growth factor receptors (e.g., FGF2, CCN2, NGF, NTF3, NTF4, BDNF, FGFR1, NGFR, NTRK1, or NTRK2), (ii) one or more metalloproteases or regulators thereof (e.g., ADAM17, ADAMTS1, ADAMTS5, MMP1, MMP2, MMP3, MMP7, MMP8, MMP10, MMP12, MMP13, TIMP1, or TIMP3), (iii) one or more cytokines, chemokines or cytokine/chemokine receptors (e.g., CXCL1, CXCL2, CXCL3, CXCL5, CXCL6, CXCL8, CCL2, CCL3, CCL5, CCL7, CCL20, IL1A, IL1B, IL4, IL6, IL6ST, IL10, IL13, IL17A, IL18, TNF, CXCR1, CXCR2, CCR7, TNFRSF1A, TNFRSF1B, IL1R1, IL1RAP, IL4R, IL6R, IL10RA, IL10RB, IL13RA1, IL13RA2, IL17RA, IL18R1, or IL18RAP), (iv) one or more regulators of neuronal signaling (e.g., SCN1A, SCN2A, SCN3A, SCN4A, SCN5A, SCN8A, SCN9A, SCN10A, SCN11A, TAC1, TAC3, TACR1, TACR2, TACR3, or ATP1A1), (v) one or more other regulators of cell signaling (e.g., CALCA, CALCB, CALCRL, RAMP1, ADM, CRCP, YAP1, MRGPRX2), or (vi) a combination of any genes of (i)-(v) is entrapped in liposomes bearing positive charges on their surface (e.g., lipofectins), which can be tagged with antibodies against cell surface antigens of the target cells. These delivery vehicles can also be used to deliver Cas9 protein/gRNA complexes.

[0331] In some embodiments, the CRISPR gene-editing system comprises one or more RNA-containing compositions. In some embodiments, the CRISPR gene-editing system further comprises one or more liposomes. In some embodiments, said one or more RNA-containing compositions comprises a guide RNA. In some embodiments, said one or more RNA-containing compositions comprises an mRNA. In some embodiments, said one or more RNA-containing compositions comprises an RNP (e.g., Cas9 and a guide RNA).

[0332] In some embodiments, wherein the composition comprises one or more liposomes collectively encapsulating (i) the RNA-guided nuclease or the nucleic acid encoding the RNA-guided nuclease and (ii) the at least one guide RNA or the nucleic acid encoding the at least one guide RNA. In some embodiments, the one or more liposomes comprises a first plurality of liposomes encapsulating the RNA-guided nuclease or a nucleic acid encoding an RNA-guided nuclease and a second plurality of liposomes encapsulating the at least one guide RNA or a nucleic acid encoding at least one guide RNA.

[0333] In one aspect, use of the CRISPR gene-editing system further comprising one or more liposomes is therapeutic. In some embodiments, use of the system treats one or more spinal conditions or disorders. In some embodiments, the condition or disorder is low back pain. In some embodiments, the condition or disorder is neck pain. In some embodiments, such conditions or disorders include disorders of the intervertebral discs (IVDs). In some embodiments, the condition or disorder is DDD. In some embodiments, the condition or disorder is a tear in the annulus fibrosis (annular ligament tear). In some embodiments, the condition or disorder is a hemiation of the nucleous pulposus (HNP) or herniated disc. In some embodiments, the condition or disorder is arthritis of the facet joints of the spine. In some embodiments, the condition or disorder is spondylosis. In some embodiments, the condition or disorder is painful scoliosis. In some embodiments, the condition or disorder is spinal stenosis.

### 2. Lipid Nanocrystals (LNC)

[0334] In one aspect, the present disclosure encompasses means for delivering a CRISPR gene-editing system to a mammalian cell via a lipid nanocrystal (LNC). In some embodiments, a CRISPR gene-editing system is delivered by a LNC. Without wishing to be bound by any particular theory, in certain embodiments, nucleic acids, when present in the nanocrystal, are resistant in aqueous solution to degradation with a nuclease. In other embodiments, proteins are protected from protease degradation while present in the nanocrystal. In some embodiments, proteins and nucleic acids encapsulated by nanocrystal are capable of penetrating the cellular plasma membrane.

[0335] In some embodiments, the CRISPR gene-editing system comprises one or more RNA-containing compositions. In some embodiments, the CRISPR gene-editing system further comprises one or more nanocrystals. In some embodiments, said one or more RNA-containing compositions comprises a guide RNA. In some embodiments, said one or more RNA-containing compositions comprises an mRNA. In some embodiments, said one or more RNA-containing compositions comprises an RNP (e.g., Cas9 and a guide RNA). In some embodiments, said one or more nanocrystals are lipid nanocrystals (LNC).

[0336] In some embodiments, the CRISPR gene-editing system comprises one or more LNCs collectively encapsulating (i) the RNA-guided nuclease or the nucleic acid encoding the RNA-guided nuclease and (ii) the at least one guide RNA or the nucleic acid encoding the at least one guide RNA. In some embodiments, the one or more LNCs comprises a first plurality of LNC encapsulating the RNA-guided nuclease or a nucleic acid encoding an RNA-guided nuclease and a second plurality of LNC encapsulating the at least one guide RNA or a nucleic acid encoding at least one guide RNA.

[0337] In some embodiments, use of the CRISPR gene-editing system further comprising one or more LNCs to target a gene for: (i) one or more growth factors or growth factor receptors (e.g., FGF2, CCN2, NGF, NTF3, NTF4, BDNF, FGFR1, NGFR, NTRK1, or NTRK2), (ii) one or more metalloproteases or regulators thereof (e.g., ADAM17, ADAMTS1, ADAMTS5, MMP1, MMP2, MMP3, MMP7, MMP8, MMP10, MMP12, MMP13, TIMP1, or TIMP3), (iii) one or more cytokines, chemokines or cytokine/chemokine receptors (e.g., CXCL1, CXCL2, CXCL3, CXCL5, CXCL6, CXCL8, CCL2, CCL3, CCL5, CCL7, CCL20, IL1A, IL1B, IL4, IL6, IL6ST, IL10, IL13, IL17A, IL18, TNF, CXCR1, CXCR2, CCR7, TNFRSF1A, TNFRSF1B, IL1R1, IL1RAP, IL4R, IL6R, IL10RA, IL10RB, IL13RA1, IL13RA2, IL17RA, IL18R1, or IL18RAP), (iv) one or more regulators of neuronal signaling (e.g., SCN1A, SCN2A, SCN3A, SCN4A, SCN5A, SCN8A, SCN9A, SCN10A, SCN11A, TAC1, TAC3, TACR1, TACR2, TACR3, or ATP1A1), (v) one or more other regulators of cell signaling (e.g., CALCA, CALCB, CALCRL, RAMP1, ADM, CRCP, YAP1, MRGPRX2), or (vi) a combination of any genes of (i)-(v) is therapeutic.

[0338] In one aspect, use of the CRISPR gene-editing system further comprising one or more LNCs is therapeutic. In some embodiments, use of the system treats one or more spinal conditions or disorders. In some embodiments, the condition or disorder is low back pain. In some embodiments, the condition or disorder is neck pain. In some embodiments, such conditions or disorders include disorders of the intervertebral discs (IVDs). In some embodiments, the condition or disorder is DDD. In some embodiments, the condition or disorder is a tear in the annulus fibrosis (annular ligament tear). In some embodiments, the condition or disorder is a herniation of the nucleous pulposus (HNP) or herniated disc. In some embodiments, the condition or disorder is arthritis of the facet joints of the spine. In some embodiments, the condition or disorder is spondylosis. In some embodiments, the condition or disorder is painful scoliosis. In some embodiments, the condition or disorder is spinal stenosis.

### VI. Pharmaceutical Compositions

[0339] In one aspect, the present disclosure encompasses pharmaceutical compositions comprising a CRISPR gene-editing system for treatment of a mammal in need thereof. In some embodiments, the CRISPR gene-editing system targets a gene selected from (i) one or more growth factors or growth factor receptors (e.g., FGF2, CCN2, NGF, NTF3, NTF4, BDNF, FGFR1, NGFR, NTRK1, or NTRK2), (ii) one or more metalloproteases or regulators thereof (e.g., ADAM17, ADAMTS1, ADAMTS5, MMP1, MMP2, MMP3, MMP7, MMP8, MMP10, MMP12, MMP13, TIMP1, or TIMP3), (iii) one or more cytokines, chemokines or cytokine/chemokine receptors (e.g., CXCL1, CXCL2, CXCL3, CXCL5, CXCL6, CXCL8, CCL2, CCL3, CCL5, CCL7, CCL20, IL1A, IL1B, IL4, IL6, IL6ST, IL10, IL13, IL17A, IL18, TNF, CXCR1, CXCR2, CCR7, TNFRSF1A, TNFRSF1B, IL1R1, IL1RAP, IL4R, IL6R, IL10RA, IL10RB, IL13RA1, IL13RA2, IL17RA, IL18R1, or IL18RAP), (iv) one or more regulators of neuronal signaling (e.g., SCN1A, SCN2A, SCN3A, SCN4A, SCN5A, SCN8A, SCN9A, SCN10A, SCN11A, TAC1, TAC3, TACR1, TACR2, TACR3, or ATP1A1), (v) one or more other regulators of cell signaling (e.g., CALCA, CALCB, CALCRL, RAMP1, ADM, CRCP, YAP1, MRGPRX2), or (vi) a combination of any genes of (i)-(v). In some embodiments, the mammal is selected from a human, a dog, a horse, and a cat.

### A. FGF2

[0340] In one aspect, methods and pharmaceutical compositions are provided for treating a back or spine condition or disorder by administering a therapeutically effective amount of a CRISPR pharmaceutical composition that targets an FGF2 gene to a subject in need thereof. In some embodiments, the CRISPR pharmaceutical composition comprises an RNA-guided nuclease and an sgRNA targeting the FGF2 gene with a crRNA sequence selected from SEQ ID NOs: 673-720. In some embodiments, the crRNA sequence is selected from SEQ ID NOs: 673-697. In some embodiments, the crRNA sequence is selected from 673-682. In some embodiments, the RNA-guided nuclease is a Cas9 protein. In some embodiments, the Cas9 protein is an S. pyogenes Cas9 protein. In some embodiments, the S. pyogenes Cas9 protein comprises K848A, K1003A, and R1060A amino acid substitutions relative to the SpCas9 sequence of NCBI accession number 7S37_P. In some embodiments, the S. pyogenes Cas9 protein comprises an R691A amino acid substitution relative to the SpCas9 sequence of NCBI accession number 7S37_P.

[0341] In some embodiments, the CRISPR gene-editing system targeting the FGF2 gene is delivered to a mammalian cell via viral vector. In some embodiments, the CRISPR gene-editing system targeting the FGF2 gene is delivered to a mammalian cell via an AAV vector. In some embodiments, the CRISPR gene-editing system targeting the FGF2 gene is delivered to a mammalian cell via a lentiviral vector. In some embodiments, the CRISPR gene-editing system targeting the FGF2 gene is delivered to a mammalian cell via a lipid nanoparticle. In some embodiments, the CRISPR gene-editing system targeting the FGF2 gene is delivered to a mammalian cell via a virus-like particle. In some embodiments, the CRISPR gene-editing system targeting the FGF2 gene is delivered to a mammalian cell via a liposome. In some embodiments, the CRISPR gene-editing system targeting the FGF2 gene is delivered to a mammalian cell via a lipid nanocrystal.

[0342] In some embodiments, the pharmaceutical composition comprises an sgRNA having a crRNA sequence selected from SEQ ID NOs: 673-720 and a S. pyogenes Cas9 protein, optionally comprising K848A, K1003A, and R1060A amino acid substitutions or an R691A amino acid substitution, encapsulated in i) a viral vector selected from an AAV vector and a lentiviral vector; ii) a lipid nanoparticle; iii) a virus-like particle; iv) a liposome; or v) a lipid nanocrystal. In some embodiments, the pharmaceutical composition comprises an sgRNA having a crRNA sequence selected from SEQ ID NOs: 673-720 and a S. pyogenes Cas9 protein encapsulated in a lipid nanoparticle.

[0343] In various embodiments, the pharmaceutical composition comprising a CRISPR gene-editing system targeting the FGF2 gene is used in a method of treating a mammal in need thereof. In some embodiments, the method treats a discogenic disease or disorder. In some embodiments, the discogenic disease or disorder is low back pain, neck pain, lumbar pain, degenerative disc disease, discogenic pain annual ligament tear, herniated disc, spinal facet joint arthritis, intervertebral disc disease, spondylosis, painful scoliosis, or spinal stenosis. In some embodiments, the discogenic disease or disorder is discogenic pain.

[0344] In some embodiments, a method is provided for treating a discogenic disease or disorder by administering a therapeutically affective amount of a pharmaceutical composition comprising a CRISPR gene-editing system targeting the FGF2 gene, as described herein, to a subject in need thereof. In some embodiments, the pharmaceutical composition comprises an LNP encapsuling an sgRNA having a crRNA sequence selected from SEQ ID NOs: 673-720 and a S. pyogenes Cas9 protein. In some embodiments, the crRNA sequence is selected from SEQ ID NOs: 673-697. In some embodiments, the crRNA sequence is selected from SEQ ID NOs: 673-682. In some embodiments, the pharmaceutical composition is administered by intradiscal injection.

[0345] In some embodiments, a method is provided for treating a musculoskeletal disease or disorder by administering a therapeutically affective amount of a pharmaceutical composition comprising a CRISPR gene-editing system targeting the FGF2 gene, as described herein, to a subject in need thereof. In some embodiments, the musculoskeletal disease or disorder is Arthritis, Infectious Intermittent joint effusion, Ankylosing spondylitis, Arthritis, Osteoarthritis, Spondylarthritis, Plantar fasciitis, Degenerative polyarthritis, Hemophilic arthropathy, Inflammatory myopathy with abundant macrophages, or Polymyositis.

[0346] In yet other embodiments, a method is provided for treating an inflammatory disease or disorder by administering a therapeutically affective amount of a pharmaceutical composition comprising a CRISPR gene-editing system targeting the FGF2 gene, as described herein, to a subject in need thereof. In some embodiments, the inflammatory disease or disorder is Autoinflammatory Disease (AID), Cryopyrin Associated Periodic syndrome (CAPS), Familial Mediterranean Fever (FMF), TNF-Receptor Associated Periodic Syndrome (TRAPS), Hyper-IgD Syndrome (HIDS), Systemic Lupus Erythematosus (SLE), or Fibrosis (general).

[0347] In certain embodiments, any region of an FGF2 gene (e.g., 5′ untranslated region [UTR], exon 1, exon 2, exon 3, exon 4, any intervening intronic regions, intron/exon junctions, the 3′ UTR, or polyadenylation signal) is targeted by an RNA-guided nuclease to alter the gene. In some embodiments, the FGF2 gene targeted by an RNA-guided nuclease is from a mammal. In some embodiments, the FGF2 gene targeted by an RNA-guided nuclease is from a human (hFGF2). In some embodiments, the FGF2 gene targeted by an RNA-guided nuclease is from a dog (cFGF2). In some embodiments, the FGF2 gene targeted by an RNA-guided nuclease is from a horse (eFGF2). In some embodiments, the FGF2 gene targeted by an RNA-guided nuclease is from a cat (fFGF2).

### B. FGFR1

[0348] In one aspect, methods and pharmaceutical compositions are provided for treating a back or spine condition or disorder by administering a therapeutically effective amount of a CRISPR pharmaceutical composition that targets an FGFR1 gene to a subject in need thereof. In some embodiments, the CRISPR pharmaceutical composition comprises an RNA-guided nuclease and an sgRNA targeting the FGFR1 gene with a crRNA sequence selected from SEQ ID NOs: 721-768. In some embodiments, the crRNA sequence is selected from SEQ ID NOs: 721-745. In some embodiments, the crRNA sequence is selected from 721-730. In some embodiments, the RNA-guided nuclease is a Cas9 protein. In some embodiments, the Cas9 protein is an S. pyogenes Cas9 protein. In some embodiments, the S. pyogenes Cas9 protein comprises K848A, K1003A, and R1060A amino acid substitutions relative to the SpCas9 sequence of NCBI accession number 7S37_P. In some embodiments, the S. pyogenes Cas9 protein comprises an R691A amino acid substitution relative to the SpCas9 sequence of NCBI accession number 7S37_P.

[0349] In some embodiments, the CRISPR gene-editing system targeting the FGFR1 gene is delivered to a mammalian cell via viral vector. In some embodiments, the CRISPR gene-editing system targeting the FGFR1 gene is delivered to a mammalian cell via an AAV vector. In some embodiments, the CRISPR gene-editing system targeting the FGFR1 gene is delivered to a mammalian cell via a lentiviral vector. In some embodiments, the CRISPR gene-editing system targeting the FGFR1 gene is delivered to a mammalian cell via a lipid nanoparticle. In some embodiments, the CRISPR gene-editing system targeting the FGFR1 gene is delivered to a mammalian cell via a virus-like particle. In some embodiments, the CRISPR gene-editing system targeting the FGFR1 gene is delivered to a mammalian cell via a liposome. In some embodiments, the CRISPR gene-editing system targeting the FGFR1 gene is delivered to a mammalian cell via a lipid nanocrystal.

[0350] In some embodiments, the pharmaceutical composition comprises an sgRNA having a crRNA sequence selected from SEQ ID NOs: 721-768 and a S. pyogenes Cas9 protein, optionally comprising K848A, K1003A, and R1060A amino acid substitutions or an R691A amino acid substitution, encapsulated in i) a viral vector selected from an AAV vector and a lentiviral vector; ii) a lipid nanoparticle; iii) a virus-like particle; iv) a liposome; or v) a lipid nanocrystal. In some embodiments, the pharmaceutical composition comprises an sgRNA having a crRNA sequence selected from SEQ ID NOs: 721-768 and a S. pyogenes Cas9 protein encapsulated in a lipid nanoparticle.

[0351] In various embodiments, the pharmaceutical composition comprising a CRISPR gene-editing system targeting the FGFR1 gene is used in a method of treating a mammal in need thereof. In some embodiments, the method treats a discogenic disease or disorder. In some embodiments, the discogenic disease or disorder is low back pain, neck pain, lumbar pain, degenerative disc disease, discogenic pain annual ligament tear, herniated disc, spinal facet joint arthritis, intervertebral disc disease, spondylosis, painful scoliosis, or spinal stenosis. In some embodiments, the discogenic disease or disorder is discogenic pain.

[0352] In some embodiments, a method is provided for treating a discogenic disease or disorder by administering a therapeutically affective amount of a pharmaceutical composition comprising a CRISPR gene-editing system targeting the FGFR1 gene, as described herein, to a subject in need thereof. In some embodiments, the pharmaceutical composition comprises an LNP encapsuling an sgRNA having a crRNA sequence selected from SEQ ID NOs: 721-768 and a S. pyogenes Cas9 protein. In some embodiments, the crRNA sequence is selected from SEQ ID NOs: 721-745. In some embodiments, the crRNA sequence is selected from SEQ ID NOs: 721-730. In some embodiments, the pharmaceutical composition is administered by intradiscal injection.

[0353] In some embodiments, a method is provided for treating a musculoskeletal disease or disorder by administering a therapeutically affective amount of a pharmaceutical composition comprising a CRISPR gene-editing system targeting the FGFR1 gene, as described herein, to a subject in need thereof. In some embodiments, the musculoskeletal disease or disorder is Arthritis, Infectious Intermittent joint effusion, Ankylosing spondylitis, Arthritis, Osteoarthritis, Spondylarthritis, Plantar fasciitis, Degenerative polyarthritis, Hemophilic arthropathy, inflammatory myopathy with abundant macrophages, or Polymyositis.

[0354] In yet other embodiments, a method is provided for treating an inflammatory disease or disorder by administering a therapeutically affective amount of a pharmaceutical composition comprising a CRISPR gene-editing system targeting the FGFR1 gene, as described herein, to a subject in need thereof. In some embodiments, the inflammatory disease or disorder is Autoinflammatory Disease (AID), Cryopyrin Associated Periodic syndrome (CAPS), Familial Mediterranean Fever (FMF), TNF-Receptor Associated Periodic Syndrome (TRAPS), Hyper-IgD Syndrome (HIDS), Systemic Lupus Erythematosus (SLE), or Fibrosis (general).

[0355] In certain embodiments, any region of an FGFR1 gene (e.g., 5′ untranslated region [UTR], exon 1, exon 2, exon 3, exon 4, exon 5, exon 6, exon 7, exon 8, exon 9, exon 10, exon 11, exon 12, exon 13, exon 14, exon 15, exon 16, exon 17, exon 18 exon 19, exon 20, exon 21, exon 22, exon 23, exon 24 any intervening intronic regions, intron/exon junctions, the 3′ UTR, or polyadenylation signal) is targeted by an RNA-guided nuclease to alter the gene. In some embodiments, the FGFR1 gene targeted by an RNA-guided nuclease is from a mammal. In some embodiments, the FGFR1 gene targeted by an RNA-guided nuclease is from a human (hFGFR1). In some embodiments, the FGR1 gene targeted by an RNA-guided nuclease is from a dog (cFGFR1). In some embodiments, the FGFR1 gene targeted by an RNA-guided nuclease is from a horse (eFGFR1). In some embodiments, the FGFR1 gene targeted by an RNA-guided nuclease is from a cat (fFGFR1).

### C. CCN2

[0356] In one aspect, methods and pharmaceutical compositions are provided for treating a back or spine condition or disorder by administering a therapeutically effective amount of a CRISPR pharmaceutical composition that targets an CCN2 gene to a subject in need thereof. In some embodiments, the CRISPR pharmaceutical composition comprises an RNA-guided nuclease and an sgRNA targeting the CCN2 gene with a crRNA sequence selected from SEQ ID NOs: 426-473. In some embodiments, the crRNA sequence is selected from SEQ ID NOs: 426-450. In some embodiments, the crRNA sequence is selected from 426-435. In some embodiments, the RNA-guided nuclease is a Cas9 protein. In some embodiments, the Cas9 protein is an S. pyogenes Cas9 protein. In some embodiments, the S. pyogenes Cas9 protein comprises K848A, K1003A, and R1060A amino acid substitutions relative to the SpCas9 sequence of NCBI accession number 7S37_P. In some embodiments, the S. pyogenes Cas9 protein comprises an R691A amino acid substitution relative to the SpCas9 sequence of NCBI accession number 7S37_P.

[0357] In some embodiments, the CRISPR gene-editing system targeting the CCN2 gene is delivered to a mammalian cell via viral vector. In some embodiments, the CRISPR gene-editing system targeting the CCN2 gene is delivered to a mammalian cell via an AAV vector. In some embodiments, the CRISPR gene-editing system targeting the CCN2 gene is delivered to a mammalian cell via a lentiviral vector. In some embodiments, the CRISPR gene-editing system targeting the CCN2 gene is delivered to a mammalian cell via a lipid nanoparticle. In some embodiments, the CRISPR gene-editing system targeting the CCN2 gene is delivered to a mammalian cell via a virus-like particle. In some embodiments, the CRISPR gene-editing system targeting the CCN2 gene is delivered to a mammalian cell via a liposome. In some embodiments, the CRISPR gene-editing system targeting the CCN2 gene is delivered to a mammalian cell via a lipid nanocrystal.

[0358] In some embodiments, the pharmaceutical composition comprises an sgRNA having a crRNA sequence selected from SEQ ID NOs: 426-473 and a S. pyogenes Cas9 protein, optionally comprising K848A, K1003A, and R1060A amino acid substitutions or an R691A amino acid substitution, encapsulated in i) a viral vector selected from an AAV vector and a lentiviral vector; ii) a lipid nanoparticle; iii) a virus-like particle; iv) a liposome; or v) a lipid nanocrystal. In some embodiments, the pharmaceutical composition comprises an sgRNA having a crRNA sequence selected from SEQ ID NOs: 426-473 and a S. pyogenes Cas9 protein encapsulated in a lipid nanoparticle.

[0359] In various embodiments, the pharmaceutical composition comprising a CRISPR gene-editing system targeting the CCN2 gene is used in a method of treating a mammal in need thereof. In some embodiments, the method treats a discogenic disease or disorder. In some embodiments, the discogenic disease or disorder is low back pain, neck pain, lumbar pain, degenerative disc disease, discogenic pain annual ligament tear, herniated disc, spinal facet joint arthritis, intervertebral disc disease, spondylosis, painful scoliosis, or spinal stenosis. In some embodiments, the discogenic disease or disorder is discogenic pain.

[0360] In some embodiments, a method is provided for treating a discogenic disease or disorder by administering a therapeutically affective amount of a pharmaceutical composition comprising a CRISPR gene-editing system targeting the CCN2 gene, as described herein, to a subject in need thereof. In some embodiments, the pharmaceutical composition comprises an LNP encapsuling an sgRNA having a crRNA sequence selected from SEQ ID NOs: 426-473 and a S. pyogenes Cas9 protein. In some embodiments, the crRNA sequence is selected from SEQ ID NOs: 426-450. In some embodiments, the crRNA sequence is selected from SEQ ID NOs: 426-475. In some embodiments, the pharmaceutical composition is administered by intradiscal injection.

[0361] In some embodiments, a method is provided for treating a musculoskeletal disease or disorder by administering a therapeutically affective amount of a pharmaceutical composition comprising a CRISPR gene-editing system targeting the CCN2 gene, as described herein, to a subject in need thereof. In some embodiments, the musculoskeletal disease or disorder is Arthritis, Infectious Intermittent joint effusion, Ankylosing spondylitis, Arthritis, Osteoarthritis, Spondylarthritis, Plantar fasciitis, Degenerative polyarthritis, Hemophilic arthropathy, Inflammatory myopathy with abundant macrophages, or Polymyositis.

[0362] In yet other embodiments, a method is provided for treating an inflammatory disease or disorder by administering a therapeutically affective amount of a pharmaceutical composition comprising a CRISPR gene-editing system targeting the CCN2 gene, as described herein, to a subject in need thereof. In some embodiments, the inflammatory disease or disorder is Autoinflammatory Disease (AID), Cryopyrin Associated Periodic syndrome (CAPS), Familial Mediterranean Fever (FMF), TNF-Receptor Associated Periodic Syndrome (TRAPS), Hyper-IgD Syndrome (HIDS), Systemic Lupus Erythematosus (SLE), or Fibrosis (general).

[0363] In certain embodiments, any region of a CCN2 gene (e.g., 5′ untranslated region [UTR], exon 1, exon 2, exon 3, exon 4, exon 5, any intervening intronic regions, intron/exon junctions, the 3′ UTR, or polyadenylation signal) is targeted by an RNA-guided nuclease to alter the gene. In some embodiments, the CCN2 gene targeted by an RNA-guided nuclease is from a mammal. In some embodiments, the CCN2 gene targeted by an RNA-guided nuclease is from a human (hCCN2). In some embodiments, the CCN2 gene targeted by an RNA-guided nuclease is from a dog (cCCN2). In some embodiments, the CCN2 gene targeted by an RNA-guided nuclease is from a horse (eCCN2). In some embodiments, the CCN2 gene targeted by an RNA-guided nuclease is from a cat (fCCN2).

### D. ADAMTS5

[0364] In one aspect, methods and pharmaceutical compositions are provided for treating a back or spine condition or disorder by administering a therapeutically effective amount of a CRISPR pharmaceutical composition that targets an ADAMTS5 gene to a subject in need thereof. In some embodiments, the CRISPR pharmaceutical composition comprises an RNA-guided nuclease and an sgRNA targeting the ADAMTS5 gene with a crRNA sequence selected from SEQ ID NOs: 97-144. In some embodiments, the crRNA sequence is selected from SEQ ID NOs: 97-121. In some embodiments, the crRNA sequence is selected from 97-106. In some embodiments, the RNA-guided nuclease is a Cas9 protein. In some embodiments, the Cas9 protein is an S. pyogenes Cas9 protein. In some embodiments, the S. pyogenes Cas9 protein comprises K848A, K1003A, and R1060A amino acid substitutions relative to the SpCas9 sequence of NCBI accession number 7S37_P. In some embodiments, the S. pyogenes Cas9 protein comprises an R691A amino acid substitution relative to the SpCas9 sequence of NCBI accession number 7S37_P.

[0365] In some embodiments, the CRISPR gene-editing system targeting the ADAMTS5 gene is delivered to a mammalian cell via viral vector. In some embodiments, the CRISPR gene-editing system targeting the ADAMTS5 gene is delivered to a mammalian cell via an AAV vector. In some embodiments, the CRISPR gene-editing system targeting the ADAMTS5 gene is delivered to a mammalian cell via a lentiviral vector. In some embodiments, the CRISPR gene-editing system targeting the ADAMTS5 gene is delivered to a mammalian cell via a lipid nanoparticle. In some embodiments, the CRISPR gene-editing system targeting the ADAMTS5 gene is delivered to a mammalian cell via a virus-like particle. In some embodiments, the CRISPR gene-editing system targeting the ADAMTS5 gene is delivered to a mammalian cell via a liposome. In some embodiments, the CRISPR gene-editing system targeting the ADAMTS5 gene is delivered to a mammalian cell via a lipid nanocrystal.

[0366] In some embodiments, the pharmaceutical composition comprises an sgRNA having a crRNA sequence selected from SEQ ID NOs: 97-144 and a S. pyogenes Cas9 protein, optionally comprising K848A, K1003A, and R1060A amino acid substitutions or an R691A amino acid substitution, encapsulated in i) a viral vector selected from an AAV vector and a lentiviral vector; ii) a lipid nanoparticle; iii) a virus-like particle; iv) a liposome; or v) a lipid nanocrystal. In some embodiments, the pharmaceutical composition comprises an sgRNA having a crRNA sequence selected from SEQ ID NOs: 97-144 and a S. pyogenes Cas9 protein encapsulated in a lipid nanoparticle.

[0367] In various embodiments, the pharmaceutical composition comprising a CRISPR gene-editing system targeting the ADAMTS5 gene is used in a method of treating a mammal in need thereof. In some embodiments, the method treats a discogenic disease or disorder. In some embodiments, the discogenic disease or disorder is low back pain, neck pain, lumbar pain, degenerative disc disease, discogenic pain annual ligament tear, herniated disc, spinal facet joint arthritis, intervertebral disc disease, spondylosis, painful scoliosis, or spinal stenosis. In some embodiments, the discogenic disease or disorder is discogenic pain.

[0368] In some embodiments, a method is provided for treating a discogenic disease or disorder by administering a therapeutically affective amount of a pharmaceutical composition comprising a CRISPR gene-editing system targeting the ADAMTS5 gene, as described herein, to a subject in need thereof. In some embodiments, the pharmaceutical composition comprises an LNP encapsuling an sgRNA having a crRNA sequence selected from SEQ ID NOs: 97-144 and a S. pyogenes Cas9 protein. In some embodiments, the crRNA sequence is selected from SEQ ID NOs: 97-121. In some embodiments, the crRNA sequence is selected from SEQ ID NOs: 97-106. In some embodiments, the pharmaceutical composition is administered by intradiscal injection.

[0369] In some embodiments, a method is provided for treating a musculoskeletal disease or disorder by administering a therapeutically affective amount of a pharmaceutical composition comprising a CRISPR gene-editing system targeting the ADAMTS5 gene, as described herein, to a subject in need thereof. In some embodiments, the musculoskeletal disease or disorder is Arthritis, Infectious Intermittent joint effusion, Ankylosing spondylitis, Arthritis, Osteoarthritis, Spondylarthritis, Plantar fasciitis, Degenerative polyarthritis, Hemophilic arthropathy, Inflammatory myopathy with abundant macrophages, or Polymyositis.

[0370] In yet other embodiments, a method is provided for treating an inflammatory disease or disorder by administering a therapeutically affective amount of a pharmaceutical composition comprising a CRISPR gene-editing system targeting the ADAMTS5 gene, as described herein, to a subject in need thereof. In some embodiments, the inflammatory disease or disorder is Autoinflammatory Disease (AID), Cryopyrin Associated Periodic syndrome (CAPS), Familial Mediterranean Fever (FMF), TNF-Receptor Associated Periodic Syndrome (TRAPS), Hyper-IgD Syndrome (HIDS), Systemic Lupus Erythematosus (SLE), or Fibrosis (general).

[0371] In certain embodiments, any region of an ADAMTS5 gene (e.g., 5′ untranslated region [UTR], exon 1, exon 2, exon 3, exon 4, exon 5, exon 6, exon 7, exon 8, exon 9, any intervening intronic regions, intron/exon junctions, the 3′ UTR, or polyadenylation signal) is targeted by an RNA-guided nuclease to alter the gene. In some embodiments, the ADAMTS5 gene targeted by an RNA-guided nuclease is from a mammal. In some embodiments, the ADAMTS5 gene targeted by an RNA-guided nuclease is from a human (hADAMTS5). In some embodiments, the ADAMTS5 gene targeted by an RNA-guided nuclease is from a dog (cADAMTS5). In some embodiments, the ADAMTS5 gene targeted by an RNA-guided nuclease is from a horse (eADAMTS5). In some embodiments, the ADAMTS5 gene targeted by an RNA-guided nuclease is from a cat (fADAMTS5).

### E. ADAMTS1

[0372] In one aspect, methods and pharmaceutical compositions are provided for treating a back or spine condition or disorder by administering a therapeutically effective amount of a CRISPR pharmaceutical composition that targets an ADAMTS1 gene to a subject in need thereof. In some embodiments, the CRISPR pharmaceutical composition comprises an RNA-guided nuclease and an sgRNA targeting the ADAMTS1 gene with a crRNA sequence selected from SEQ ID NOs: 49-96. In some embodiments, the crRNA sequence is selected from SEQ ID NOs: 49-73. In some embodiments, the crRNA sequence is selected from 49-58. In some embodiments, the RNA-guided nuclease is a Cas9 protein. In some embodiments, the Cas9 protein is an S. pyogenes Cas9 protein. In some embodiments, the S. pyogenes Cas9 protein comprises K848A, K1003A, and R1060A amino acid substitutions relative to the SpCas9 sequence of NCBI accession number 7S37_P. In some embodiments, the S. pyogenes Cas9 protein comprises an R691A amino acid substitution relative to the SpCas9 sequence of NCBI accession number 7S37_P.

[0373] In some embodiments, the CRISPR gene-editing system targeting the ADAMTS1 gene is delivered to a mammalian cell via viral vector. In some embodiments, the CRISPR gene-editing system targeting the ADAMTS1 gene is delivered to a mammalian cell via an AAV vector. In some embodiments, the CRISPR gene-editing system targeting the ADAMTS1 gene is delivered to a mammalian cell via a lentiviral vector. In some embodiments, the CRISPR gene-editing system targeting the ADAMTS1 gene is delivered to a mammalian cell via a lipid nanoparticle. In some embodiments, the CRISPR gene-editing system targeting the ADAMTS1 gene is delivered to a mammalian cell via a virus-like particle. In some embodiments, the CRISPR gene-editing system targeting the ADAMTS1 gene is delivered to a mammalian cell via a liposome. In some embodiments, the CRISPR gene-editing system targeting the ADAMTS1 gene is delivered to a mammalian cell via a lipid nanocrystal.

[0374] In some embodiments, the pharmaceutical composition comprises an sgRNA having a crRNA sequence selected from SEQ ID NOs: 49-96 and a S. pyogenes Cas9 protein, optionally comprising K848A, K1003A, and R1060A amino acid substitutions or an R691A amino acid substitution, encapsulated in i) a viral vector selected from an AAV vector and a lentiviral vector; ii) a lipid nanoparticle; iii) a virus-like particle; iv) a liposome; or v) a lipid nanocrystal. In some embodiments, the pharmaceutical composition comprises an sgRNA having a crRNA sequence selected from SEQ ID NOs: 49-96 and a S. pyogenes Cas9 protein encapsulated in a lipid nanoparticle.

[0375] In various embodiments, the pharmaceutical composition comprising a CRISPR gene-editing system targeting the ADAMTS1 gene is used in a method of treating a mammal in need thereof. In some embodiments, the method treats a discogenic disease or disorder. In some embodiments, the discogenic disease or disorder is low back pain, neck pain, lumbar pain, degenerative disc disease, discogenic pain annual ligament tear, herniated disc, spinal facet joint arthritis, intervertebral disc disease, spondylosis, painful scoliosis, or spinal stenosis. In some embodiments, the discogenic disease or disorder is discogenic pain.

[0376] In some embodiments, a method is provided for treating a discogenic disease or disorder by administering a therapeutically affective amount of a pharmaceutical composition comprising a CRISPR gene-editing system targeting the ADAMTS1 gene, as described herein, to a subject in need thereof. In some embodiments, the pharmaceutical composition comprises an LNP encapsuling an sgRNA having a crRNA sequence selected from SEQ ID NOs: 49-96and a S. pyogenes Cas9 protein. In some embodiments, the crRNA sequence is selected from SEQ ID NOs: 49-73. In some embodiments, the crRNA sequence is selected from SEQ ID NOs: 49-58. In some embodiments, the pharmaceutical composition is administered by intradiscal injection.

[0377] In some embodiments, a method is provided for treating a musculoskeletal disease or disorder by administering a therapeutically affective amount of a pharmaceutical composition comprising a CRISPR gene-editing system targeting the ADAMTS1 gene, as described herein, to a subject in need thereof. In some embodiments, the musculoskeletal disease or disorder is Arthritis, Infectious Intermittent joint effusion, Ankylosing spondylitis, Arthritis, Osteoarthritis, Spondylarthritis, Plantar fasciitis, Degenerative polyarthritis, Hemophilic arthropathy, Inflammatory myopathy with abundant macrophages, or Polymyositis.

[0378] In yet other embodiments, a method is provided for treating an inflammatory disease or disorder by administering a therapeutically affective amount of a pharmaceutical composition comprising a CRISPR gene-editing system targeting the ADAMTS1 gene, as described herein, to a subject in need thereof. In some embodiments, the inflammatory disease or disorder is Autoinflammatory Disease (AID), Cryopyrin Associated Periodic syndrome (CAPS), Familial Mediterranean Fever (FMF), TNF-Receptor Associated Periodic Syndrome (TRAPS), Hyper-IgD Syndrome (HIDS), Systemic Lupus Erythematosus (SLE), or Fibrosis (general).

[0379] In certain embodiments, any region of an ADAMTS1 gene (e.g., 5′ untranslated region [UTR], exon 1, exon 2, exon 3, exon 4, exon 5, exon 6, exon 7, exon 8, exon 9, any intervening intronic regions, intron/exon junctions, the 3′ UTR, or polyadenylation signal) is targeted by an RNA-guided nuclease to alter the gene. In some embodiments, the ADAMTS1 gene targeted by an RNA-guided nuclease is from a mammal. In some embodiments, the ADAMTS1 gene targeted by an RNA-guided nuclease is from a human (hADAMTS1). In some embodiments, the ADAMTS1 gene targeted by an RNA-guided nuclease is from a dog (cADAMTS1). In some embodiments, the ADAMTS1 gene targeted by an RNA-guided nuclease is from a horse (eADAMTS1). In some embodiments, the ADAMTS1 gene targeted by an RNA-guided nuclease is from a cat (fADAMTS1).

### F. MMP1

[0380] In one aspect, methods and pharmaceutical compositions are provided for treating a back or spine condition or disorder by administering a therapeutically effective amount of a CRISPR pharmaceutical composition that targets an MMP1 gene to a subject in need thereof. In some embodiments, the CRISPR pharmaceutical composition comprises an RNA-guided nuclease and an sgRNA targeting the MMP1 gene with a crRNA sequence selected from SEQ ID NOs: 1311-1343. In some embodiments, the crRNA sequence is selected from SEQ ID NOs: 1311-1335. In some embodiments, the crRNA sequence is selected from 1311-1320. In some embodiments, the RNA-guided nuclease is a Cas9 protein. In some embodiments, the Cas9 protein is an S. pyogenes Cas9 protein. In some embodiments, the S. pyogenes Cas9 protein comprises K848A, K1003A, and R1060A amino acid substitutions relative to the SpCas9 sequence of NCBI accession number 7S37_P. In some embodiments, the S. pyogenes Cas9 protein comprises an R691A amino acid substitution relative to the SpCas9 sequence of NCBI accession number 7S37_P.

[0381] In some embodiments, the CRISPR gene-editing system targeting the MMP1 gene is delivered to a mammalian cell via viral vector. In some embodiments, the CRISPR gene-editing system targeting the MMP1 gene is delivered to a mammalian cell via an AAV vector. In some embodiments, the CRISPR gene-editing system targeting the MMP1 gene is delivered to a mammalian cell via a lentiviral vector. In some embodiments, the CRISPR gene-editing system targeting the MMP1 gene is delivered to a mammalian cell via a lipid nanoparticle. In some embodiments, the CRISPR gene-editing system targeting the MMP1 gene is delivered to a mammalian cell via a virus-like particle. In some embodiments, the CRISPR gene-editing system targeting the MMP1 gene is delivered to a mammalian cell via a liposome. In some embodiments, the CRISPR gene-editing system targeting the MMP1 gene is delivered to a mammalian cell via a lipid nanocrystal.

[0382] In some embodiments, the pharmaceutical composition comprises an sgRNA having a crRNA sequence selected from SEQ ID NOs: 1311-1343 and a S. pyogenes Cas9 protein, optionally comprising K848A, K1003A, and R1060A amino acid substitutions or an R691A amino acid substitution, encapsulated in i) a viral vector selected from an AAV vector and a lentiviral vector; ii) a lipid nanoparticle; iii) a virus-like particle; iv) a liposome; or v) a lipid nanocrystal. In some embodiments, the pharmaceutical composition comprises an sgRNA having a crRNA sequence selected from SEQ ID NOs: 1311-1343 and a S. pyogenes Cas9 protein encapsulated in a lipid nanoparticle.

[0383] In various embodiments, the pharmaceutical composition comprising a CRISPR gene-editing system targeting the MMP1 gene is used in a method of treating a mammal in need thereof. In some embodiments, the method treats a discogenic disease or disorder. In some embodiments, the discogenic disease or disorder is low back pain, neck pain, lumbar pain, degenerative disc disease, discogenic pain annual ligament tear, herniated disc, spinal facet joint arthritis, intervertebral disc disease, spondylosis, painful scoliosis, or spinal stenosis. In some embodiments, the discogenic disease or disorder is discogenic pain.

[0384] In some embodiments, a method is provided for treating a discogenic disease or disorder by administering a therapeutically affective amount of a pharmaceutical composition comprising a CRISPR gene-editing system targeting the MMP1 gene, as described herein, to a subject in need thereof. In some embodiments, the pharmaceutical composition comprises an LNP encapsuling an sgRNA having a crRNA sequence selected from SEQ ID NOs: 1311-1343 and a S. pyogenes Cas9 protein. In some embodiments, the crRNA sequence is selected from SEQ ID NOs: 1311-1335. In some embodiments, the crRNA sequence is selected from SEQ ID NOs: 1311-1320. In some embodiments, the pharmaceutical composition is administered by intradiscal injection.

[0385] In some embodiments, a method is provided for treating a musculoskeletal disease or disorder by administering a therapeutically affective amount of a pharmaceutical composition comprising a CRISPR gene-editing system targeting the MMP1 gene, as described herein, to a subject in need thereof. In some embodiments, the musculoskeletal disease or disorder is Arthritis, Infectious Intermittent joint effusion, Ankylosing spondylitis, Arthritis, Osteoarthritis, Spondylarthritis, Plantar fasciitis, Degenerative polyarthritis, Hemophilic arthropathy, Inflammatory myopathy with abundant macrophages, or Polymyositis.

[0386] In yet other embodiments, a method is provided for treating an inflammatory disease or disorder by administering a therapeutically affective amount of a pharmaceutical composition comprising a CRISPR gene-editing system targeting the MMP1 gene, as described herein, to a subject in need thereof. In some embodiments, the inflammatory disease or disorder is Autoinflammatory Disease (AID), Cryopyrin Associated Periodic syndrome (CAPS), Familial Mediterranean Fever (FMF), TNF-Receptor Associated Periodic Syndrome (TRAPS), Hyper-IgD Syndrome (HIDS), Systemic Lupus Erythematosus (SLE), or Fibrosis (general).

[0387] In certain embodiments, any region of an MMP1 gene (e.g., 5′ untranslated region [UTR], exon 1, exon 2, exon 3, exon 4, exon 5, exon 6, exon 7, exon 8, exon 9, exon 10, any intervening intronic regions, intron/exon junctions, the 3′ UTR, or polyadenylation signal) is targeted by an RNA-guided nuclease to alter the gene. In some embodiments, the MMP1 gene targeted by an RNA-guided nuclease is from a mammal. In some embodiments, the MMP1 gene targeted by an RNA-guided nuclease is from a human (hMMP1). In some embodiments, the MMP1 gene targeted by an RNA-guided nuclease is from a dog (cMMP1). In some embodiments, the MMP1 gene targeted by an RNA-guided nuclease is from a horse (eMMP1). In some embodiments, the MMP1 gene targeted by an RNA-guided nuclease is from a cat (fMMP1).

### G. MMP2

[0388] In one aspect, methods and pharmaceutical compositions are provided for treating a back or spine condition or disorder by administering a therapeutically effective amount of a CRISPR pharmaceutical composition that targets an MMP2 gene to a subject in need thereof. In some embodiments, the CRISPR pharmaceutical composition comprises an RNA-guided nuclease and an sgRNA targeting the MMP2 gene with a crRNA sequence selected from SEQ ID NOs: 1344-1391. In some embodiments, the crRNA sequence is selected from SEQ ID NOs: 1344-1368. In some embodiments, the crRNA sequence is selected from 1344-1353. In some embodiments, the RNA-guided nuclease is a Cas9 protein. In some embodiments, the Cas9 protein is an S. pyogenes Cas9 protein. In some embodiments, the S. pyogenes Cas9 protein comprises K848A, K1003A, and R1060A amino acid substitutions relative to the SpCas9 sequence of NCBI accession number 7S37_P. In some embodiments, the S. pyogenes Cas9 protein comprises an R691A amino acid substitution relative to the SpCas9 sequence of NCBI accession number 7S37_P.

[0389] In some embodiments, the CRISPR gene-editing system targeting the MMP2 gene is delivered to a mammalian cell via viral vector. In some embodiments, the CRISPR gene-editing system targeting the MMP2 gene is delivered to a mammalian cell via an AAV vector. In some embodiments, the CRISPR gene-editing system targeting the MMP2 gene is delivered to a mammalian cell via a lentiviral vector. In some embodiments, the CRISPR gene-editing system targeting the MMP2 gene is delivered to a mammalian cell via a lipid nanoparticle. In some embodiments, the CRISPR gene-editing system targeting the MMP2 gene is delivered to a mammalian cell via a virus-like particle. In some embodiments, the CRISPR gene-editing system targeting the MMP2 gene is delivered to a mammalian cell via a liposome. In some embodiments, the CRISPR gene-editing system targeting the MMP2 gene is delivered to a mammalian cell via a lipid nanocrystal.

[0390] In some embodiments, the pharmaceutical composition comprises an sgRNA having a crRNA sequence selected from SEQ ID NOs: 1344-1391 and a S. pyogenes Cas9 protein, optionally comprising K848A, K1003A, and R1060A amino acid substitutions or an R691A amino acid substitution, encapsulated in i) a viral vector selected from an AAV vector and a lentiviral vector; ii) a lipid nanoparticle; iii) a virus-like particle; iv) a liposome; or v) a lipid nanocrystal. In some embodiments, the pharmaceutical composition comprises an sgRNA having a crRNA sequence selected from SEQ ID NOs: 1344-1391 and a S. pyogenes Cas9 protein encapsulated in a lipid nanoparticle.

[0391] In various embodiments, the pharmaceutical composition comprising a CRISPR gene-editing system targeting the MMP2 gene is used in a method of treating a mammal in need thereof. In some embodiments, the method treats a discogenic disease or disorder. In some embodiments, the discogenic disease or disorder is low back pain, neck pain, lumbar pain, degenerative disc disease, discogenic pain annual ligament tear, herniated disc, spinal facet joint arthritis, intervertebral disc disease, spondylosis, painful scoliosis, or spinal stenosis. In some embodiments, the discogenic disease or disorder is discogenic pain.

[0392] In some embodiments, a method is provided for treating a discogenic disease or disorder by administering a therapeutically affective amount of a pharmaceutical composition comprising a CRISPR gene-editing system targeting the MMP2 gene, as described herein, to a subject in need thereof. In some embodiments, the pharmaceutical composition comprises an LNP encapsuling an sgRNA having a crRNA sequence selected from SEQ ID NOs: 1344-1391 and a S. pyogenes Cas9 protein. In some embodiments, the crRNA sequence is selected from SEQ ID NOs: 1344-1368. In some embodiments, the crRNA sequence is selected from SEQ ID NOs: 1344-1353. In some embodiments, the pharmaceutical composition is administered by intradiscal injection.

[0393] In some embodiments, a method is provided for treating a musculoskeletal disease or disorder by administering a therapeutically affective amount of a pharmaceutical composition comprising a CRISPR gene-editing system targeting the MMP2 gene, as described herein, to a subject in need thereof. In some embodiments, the musculoskeletal disease or disorder is Arthritis, Infectious Intermittent joint effusion, Ankylosing spondylitis, Arthritis, Osteoarthritis, Spondylarthritis, Plantar fasciitis, Degenerative polyarthritis, Hemophilic arthropathy, Inflammatory myopathy with abundant macrophages, or Polymyositis.

[0394] In yet other embodiments, a method is provided for treating an inflammatory disease or disorder by administering a therapeutically affective amount of a pharmaceutical composition comprising a CRISPR gene-editing system targeting the MMP2 gene, as described herein, to a subject in need thereof. In some embodiments, the inflammatory disease or disorder is Autoinflammatory Disease (AID), Cryopyrin Associated Periodic syndrome (CAPS), Familial Mediterranean Fever (FMF), TNF-Receptor Associated Periodic Syndrome (TRAPS), Hyper-IgD Syndrome (HIDS), Systemic Lupus Erythematosus (SLE), or Fibrosis (general).

[0395] In certain embodiments, any region of an MMP2 gene (e.g., 5′ untranslated region [UTR], exon 1, exon 2, exon 3, exon 4, exon 5, exon 6, exon 7, exon 8, exon 9, exon 10, exon 11, exon 12, exon 13, exon 14, exon 15, exon 16, exon 17, any intervening intronic regions, intron/exon junctions, the 3′ UTR, or polyadenylation signal) is targeted by an RNA-guided nuclease to alter the gene. In some embodiments, the MMP2 gene targeted by an RNA-guided nuclease is from a mammal. In some embodiments, the MMP2 gene targeted by an RNA-guided nuclease is from a human (hMMP2). In some embodiments, the MMP2 gene targeted by an RNA-guided nuclease is from a dog (cMMP2). In some embodiments, the MMP2 gene targeted by an RNA-guided nuclease is from a horse (eMMP2). In some embodiments, the MMP2 gene targeted by an RNA-guided nuclease is from a cat (fMMP2).

### H. MMP3

[0396] In one aspect, methods and pharmaceutical compositions are provided for treating a back or spine condition or disorder by administering a therapeutically effective amount of a CRISPR pharmaceutical composition that targets an MMP3 gene to a subject in need thereof. In some embodiments, the CRISPR pharmaceutical composition comprises an RNA-guided nuclease and an sgRNA targeting the MMP3 gene with a crRNA sequence selected from SEQ ID NOs: 1392-1417. In some embodiments, the crRNA sequence is selected from SEQ ID NOs: 1392-1416. In some embodiments, the crRNA sequence is selected from 1392-1401. In some embodiments, the RNA-guided nuclease is a Cas9 protein. In some embodiments, the Cas9 protein is an S. pyogenes Cas9 protein. In some embodiments, the S. pyogenes Cas9 protein comprises K848A, K1003A, and R1060A amino acid substitutions relative to the SpCas9 sequence of NCBI accession number 7S37_P. In some embodiments, the S. pyogenes Cas9 protein comprises an R691A amino acid substitution relative to the SpCas9 sequence of NCBI accession number 7S37_P.

[0397] In some embodiments, the CRISPR gene-editing system targeting the MMP3 gene is delivered to a mammalian cell via viral vector. In some embodiments, the CRISPR gene-editing system targeting the MMP3 gene is delivered to a mammalian cell via an AAV vector. In some embodiments, the CRISPR gene-editing system targeting the MMP3 gene is delivered to a mammalian cell via a lentiviral vector. In some embodiments, the CRISPR gene-editing system targeting the MMP3 gene is delivered to a mammalian cell via a lipid nanoparticle. In some embodiments, the CRISPR gene-editing system targeting the MMP3 gene is delivered to a mammalian cell via a virus-like particle. In some embodiments, the CRISPR gene-editing system targeting the MMP3 gene is delivered to a mammalian cell via a liposome. In some embodiments, the CRISPR gene-editing system targeting the MMP3 gene is delivered to a mammalian cell via a lipid nanocrystal.

[0398] In some embodiments, the pharmaceutical composition comprises an sgRNA having a crRNA sequence selected from SEQ ID NOs: 1392-1417 and a S. pyogenes Cas9 protein, optionally comprising K848A, K1003A, and R1060A amino acid substitutions or an R691A amino acid substitution, encapsulated in i) a viral vector selected from an AAV vector and a lentiviral vector; ii) a lipid nanoparticle; iii) a virus-like particle; iv) a liposome; or v) a lipid nanocrystal. In some embodiments, the pharmaceutical composition comprises an sgRNA having a crRNA sequence selected from SEQ ID NOs: 1392-1417 and a S. pyogenes Cas9 protein encapsulated in a lipid nanoparticle.

[0399] In various embodiments, the pharmaceutical composition comprising a CRISPR gene-editing system targeting the MMP3 gene is used in a method of treating a mammal in need thereof. In some embodiments, the method treats a discogenic disease or disorder. In some embodiments, the discogenic disease or disorder is low back pain, neck pain, lumbar pain, degenerative disc disease, discogenic pain annual ligament tear, herniated disc, spinal facet joint arthritis, intervertebral disc disease, spondylosis, painful scoliosis, or spinal stenosis. In some embodiments, the discogenic disease or disorder is discogenic pain.

[0400] In some embodiments, a method is provided for treating a discogenic disease or disorder by administering a therapeutically affective amount of a pharmaceutical composition comprising a CRISPR gene-editing system targeting the MMP3 gene, as described herein, to a subject in need thereof. In some embodiments, the pharmaceutical composition comprises an LNP encapsuling an sgRNA having a crRNA sequence selected from SEQ ID NOs: 1392-1417 and a S. pyogenes Cas9 protein. In some embodiments, the crRNA sequence is selected from SEQ ID NOs: 1392-1416. In some embodiments, the crRNA sequence is selected from SEQ ID NOs: 1392-1401. In some embodiments, the pharmaceutical composition is administered by intradiscal injection.

[0401] In some embodiments, a method is provided for treating a musculoskeletal disease or disorder by administering a therapeutically affective amount of a pharmaceutical composition comprising a CRISPR gene-editing system targeting the MMP3 gene, as described herein, to a subject in need thereof. In some embodiments, the musculoskeletal disease or disorder is Arthritis, Infectious Intermittent joint effusion, Ankylosing spondylitis, Arthritis, Osteoarthritis, Spondylarthritis, Plantar fasciitis, Degenerative polyarthritis, Hemophilic arthropathy, Inflammatory myopathy with abundant macrophages, or Polymyositis.

[0402] In yet other embodiments, a method is provided for treating an inflammatory disease or disorder by administering a therapeutically affective amount of a pharmaceutical composition comprising a CRISPR gene-editing system targeting the MMP3 gene, as described herein, to a subject in need thereof. In some embodiments, the inflammatory disease or disorder is Autoinflammatory Disease (AID), Cryopyrin Associated Periodic syndrome (CAPS), Familial Mediterranean Fever (FMF), TNF-Receptor Associated Periodic Syndrome (TRAPS), Hyper-IgD Syndrome (HIDS), Systemic Lupus Erythematosus (SLE), or Fibrosis (general).

[0403] In certain embodiments, any region of an MMP3 gene (e.g., 5′ untranslated region [UTR], exon 1, exon 2, exon 3, exon 4, exon 5, exon 6, exon 7, exon 8, exon 9, exon 10, any intervening intronic regions, intron/exon junctions, the 3′ UTR, or polyadenylation signal) is targeted by an RNA-guided nuclease to alter the gene. In some embodiments, the MMP3 gene targeted by an RNA-guided nuclease is from a mammal. In some embodiments, the MMP3 gene targeted by an RNA-guided nuclease is from a human (hMMP3). In some embodiments, the MMP3 gene targeted by an RNA-guided nuclease is from a dog (cMMP3). In some embodiments, the MMP3 gene targeted by an RNA-guided nuclease is from a horse (eMMP3). In some embodiments, the MMP3 gene targeted by an RNA-guided nuclease is from a cat (fMMP3).

### I. MMP7

[0404] In one aspect, methods and pharmaceutical compositions are provided for treating a back or spine condition or disorder by administering a therapeutically effective amount of a CRISPR pharmaceutical composition that targets an MMP7 gene to a subject in need thereof. In some embodiments, the CRISPR pharmaceutical composition comprises an RNA-guided nuclease and an sgRNA targeting the MMP7 gene with a crRNA sequence selected from SEQ ID NOs: 1418-1436. In some embodiments, the crRNA sequence is selected from 1418-1427. In some embodiments, the RNA-guided nuclease is a Cas9 protein. In some embodiments, the Cas9 protein is an S. pyogenes Cas9 protein. In some embodiments, the S. pyogenes Cas9 protein comprises K848A, K1003A, and R1060A amino acid substitutions relative to the SpCas9 sequence of NCBI accession number 7S37_P. In some embodiments, the S. pyogenes Cas9 protein comprises an R691A amino acid substitution relative to the SpCas9 sequence of NCBI accession number 7S37_P.

[0405] In some embodiments, the CRISPR gene-editing system targeting the MMP7 gene is delivered to a mammalian cell via viral vector. In some embodiments, the CRISPR gene-editing system targeting the MMP7 gene is delivered to a mammalian cell via an AAV vector. In some embodiments, the CRISPR gene-editing system targeting the MMP7 gene is delivered to a mammalian cell via a lentiviral vector. In some embodiments, the CRISPR gene-editing system targeting the MMP7 gene is delivered to a mammalian cell via a lipid nanoparticle. In some embodiments, the CRISPR gene-editing system targeting the MMP7 gene is delivered to a mammalian cell via a virus-like particle. In some embodiments, the CRISPR gene-editing system targeting the MMP7 gene is delivered to a mammalian cell via a liposome. In some embodiments, the CRISPR gene-editing system targeting the MMP7 gene is delivered to a mammalian cell via a lipid nanocrystal.

[0406] In some embodiments, the pharmaceutical composition comprises an sgRNA having a crRNA sequence selected from SEQ ID NOs: 1418-1436 and a S. pyogenes Cas9 protein, optionally comprising K848A, K1003A, and R1060A amino acid substitutions or an R691A amino acid substitution, encapsulated in i) a viral vector selected from an AAV vector and a lentiviral vector; ii) a lipid nanoparticle; iii) a virus-like particle; iv) a liposome; or v) a lipid nanocrystal. In some embodiments, the pharmaceutical composition comprises an sgRNA having a crRNA sequence selected from SEQ ID NOs: 1418-1436 and a S. pyogenes Cas9 protein encapsulated in a lipid nanoparticle.

[0407] In various embodiments, the pharmaceutical composition comprising a CRISPR gene-editing system targeting the MMP7 gene is used in a method of treating a mammal in need thereof. In some embodiments, the method treats a discogenic disease or disorder. In some embodiments, the discogenic disease or disorder is low back pain, neck pain, lumbar pain, degenerative disc disease, discogenic pain annual ligament tear, herniated disc, spinal facet joint arthritis, intervertebral disc disease, spondylosis, painful scoliosis, or spinal stenosis. In some embodiments, the discogenic disease or disorder is discogenic pain.

[0408] In some embodiments, a method is provided for treating a discogenic disease or disorder by administering a therapeutically affective amount of a pharmaceutical composition comprising a CRISPR gene-editing system targeting the MMP7 gene, as described herein, to a subject in need thereof. In some embodiments, the pharmaceutical composition comprises an LNP encapsuling an sgRNA having a crRNA sequence selected from SEQ ID NOs: 1418-1436 and a S. pyogenes Cas9 protein. In some embodiments, the crRNA sequence is selected from SEQ ID NOs: 1418-1427. In some embodiments, the pharmaceutical composition is administered by intradiscal injection.

[0409] In some embodiments, a method is provided for treating a musculoskeletal disease or disorder by administering a therapeutically affective amount of a pharmaceutical composition comprising a CRISPR gene-editing system targeting the MMP7 gene, as described herein, to a subject in need thereof. In some embodiments, the musculoskeletal disease or disorder is Arthritis, Infectious Intermittent joint effusion, Ankylosing spondylitis, Arthritis, Osteoarthritis, Spondylarthritis, Plantar fasciitis, Degenerative polyarthritis, Hemophilic arthropathy, Inflammatory myopathy with abundant macrophages, or Polymyositis.

[0410] In yet other embodiments, a method is provided for treating an inflammatory disease or disorder by administering a therapeutically affective amount of a pharmaceutical composition comprising a CRISPR gene-editing system targeting the MMP7 gene, as described herein, to a subject in need thereof. In some embodiments, the inflammatory disease or disorder is Autoinflammatory Disease (AID), Cryopyrin Associated Periodic syndrome (CAPS), Familial Mediterranean Fever (FMF), TNF-Receptor Associated Periodic Syndrome (TRAPS), Hyper-IgD Syndrome (HIDS), Systemic Lupus Erythematosus (SLE), or Fibrosis (general).

[0411] In certain embodiments, any region of an MMP7 gene (e.g., 5′ untranslated region [UTR], exon 1, exon 2, exon 3, exon 4, exon 5, exon 6, any intervening intronic regions, intron/exon junctions, the 3′ UTR, or polyadenylation signal) is targeted by an RNA-guided nuclease to alter the gene. In some embodiments, the MMP7 gene targeted by an RNA-guided nuclease is from a mammal. In some embodiments, the MMP7 gene targeted by an RNA-guided nuclease is from a human (hMMP7). In some embodiments, the MMP7 gene targeted by an RNA-guided nuclease is from a dog (cMMP7). In some embodiments, the MMP7 gene targeted by an RNA-guided nuclease is from ahorse (eMMP7). In some embodiments, the MMP7 gene targeted by an RNA-guided nuclease is from a cat (fMMP7).

### J. MMP8

[0412] In one aspect, methods and pharmaceutical compositions are provided for treating a back or spine condition or disorder by administering a therapeutically effective amount of a CRISPR pharmaceutical composition that targets an MMP8 gene to a subject in need thereof. In some embodiments, the CRISPR pharmaceutical composition comprises an RNA-guided nuclease and an sgRNA targeting the MMP8 gene with a crRNA sequence selected from SEQ ID NOs: 1437-1474. In some embodiments, the crRNA sequence is selected from SEQ ID NOs: 1437-1461. In some embodiments, the crRNA sequence is selected from 1437-1446. In some embodiments, the RNA-guided nuclease is a Cas9 protein. In some embodiments, the Cas9 protein is an S. pyogenes Cas9 protein. In some embodiments, the S. pyogenes Cas9 protein comprises K848A, K1003A, and R1060A amino acid substitutions relative to the SpCas9 sequence of NCBI accession number 7S37_P. In some embodiments, the S. pyogenes Cas9 protein comprises an R691A amino acid substitution relative to the SpCas9 sequence of NCBI accession number 7S37_P.

[0413] In some embodiments, the CRISPR gene-editing system targeting the MMP8 gene is delivered to a mammalian cell via viral vector. In some embodiments, the CRISPR gene-editing system targeting the MMP8 gene is delivered to a mammalian cell via an AAV vector. In some embodiments, the CRISPR gene-editing system targeting the MMP8 gene is delivered to a mammalian cell via a lentiviral vector. In some embodiments, the CRISPR gene-editing system targeting the MMP8 gene is delivered to a mammalian cell via a lipid nanoparticle. In some embodiments, the CRISPR gene-editing system targeting the MMP8 gene is delivered to a mammalian cell via a virus-like particle. In some embodiments, the CRISPR gene-editing system targeting the MMP8 gene is delivered to a mammalian cell via a liposome. In some embodiments, the CRISPR gene-editing system targeting the MMP8 gene is delivered to a mammalian cell via a lipid nanocrystal.

[0414] In some embodiments, the pharmaceutical composition comprises an sgRNA having a crRNA sequence selected from SEQ ID NOs: 1437-1474 and a S. pyogenes Cas9 protein, optionally comprising K848A, K1003A, and R1060A amino acid substitutions or an R691A amino acid substitution, encapsulated in i) a viral vector selected from an AAV vector and a lentiviral vector; ii) a lipid nanoparticle; iii) a virus-like particle; iv) a liposome; or v) a lipid nanocrystal. In some embodiments, the pharmaceutical composition comprises an sgRNA having a crRNA sequence selected from SEQ ID NOs: 1437-1474 and a S. pyogenes Cas9 protein encapsulated in a lipid nanoparticle.

[0415] In various embodiments, the pharmaceutical composition comprising a CRISPR gene-editing system targeting the MMP8 gene is used in a method of treating a mammal in need thereof. In some embodiments, the method treats a discogenic disease or disorder. In some embodiments, the discogenic disease or disorder is low back pain, neck pain, lumbar pain, degenerative disc disease, discogenic pain annual ligament tear, herniated disc, spinal facet joint arthritis, intervertebral disc disease, spondylosis, painful scoliosis, or spinal stenosis. In some embodiments, the discogenic disease or disorder is discogenic pain.

[0416] In some embodiments, a method is provided for treating a discogenic disease or disorder by administering a therapeutically affective amount of a pharmaceutical composition comprising a CRISPR gene-editing system targeting the MMP8 gene, as described herein, to a subject in need thereof. In some embodiments, the pharmaceutical composition comprises an LNP encapsuling an sgRNA having a crRNA sequence selected from SEQ ID NOs: 1437-1474 and a S. pyogenes Cas9 protein. In some embodiments, the crRNA sequence is selected from SEQ ID NOs: 1437-1461. In some embodiments, the crRNA sequence is selected from SEQ ID NOs: 1437-1446. In some embodiments, the pharmaceutical composition is administered by intradiscal injection.

[0417] In some embodiments, a method is provided for treating a musculoskeletal disease or disorder by administering a therapeutically affective amount of a pharmaceutical composition comprising a CRISPR gene-editing system targeting the MMP8 gene, as described herein, to a subject in need thereof. In some embodiments, the musculoskeletal disease or disorder is Arthritis. Infectious Intermittent joint effusion, Ankylosing spondylitis, Arthritis, Osteoarthritis, Spondylarthritis, Plantar fasciitis, Degenerative polyarthritis, Hemophilic arthropathy, Inflammatory myopathy with abundant macrophages, or Polymyositis.

[0418] In yet other embodiments, a method is provided for treating an inflammatory disease or disorder by administering a therapeutically affective amount of a pharmaceutical composition comprising a CRISPR gene-editing system targeting the MMP8 gene, as described herein, to a subject in need thereof. In some embodiments, the inflammatory disease or disorder is Autoinflammatory Disease (AID), Cryopyrin Associated Periodic syndrome (CAPS), Familial Mediterranean Fever (FMF), TNF-Receptor Associated Periodic Syndrome (TRAPS), Hyper-IgD Syndrome (HIDS), Systemic Lupus Erythematosus (SLE), or Fibrosis (general).

[0419] In certain embodiments, any region of an MMP8 gene (e.g., 5′ untranslated region [UTR], exon 1, exon 2, exon 3, exon 4, exon 5, exon 6, any intervening intronic regions, intron/exon junctions, the 3′ UTR, or polyadenylation signal) is targeted by an RNA-guided nuclease to alter the gene. In some embodiments, the MMP8 gene targeted by an RNA-guided nuclease is from a mammal. In some embodiments, the MMP8 gene targeted by an RNA-guided nuclease is from a human (hMMP8). In some embodiments, the MMP8 gene targeted by an RNA-guided nuclease is from a dog (cMMP8). In some embodiments, the MMP8 gene targeted by an RNA-guided nuclease is from a horse (eMMP8). In some embodiments, the MMP8 gene targeted by an RNA-guided nuclease is from a cat (fMMP8).

### K. MMP10

[0420] In one aspect, methods and pharmaceutical compositions are provided for treating a back or spine condition or disorder by administering a therapeutically effective amount of a CRISPR pharmaceutical composition that targets an MMP10 gene to a subject in need thereof. In some embodiments, the CRISPR pharmaceutical composition comprises an RNA-guided nuclease and an sgRNA targeting the MMP10 gene with a crRNA sequence selected from SEQ ID NOs: 1475-1497. In some embodiments, the crRNA sequence is selected from 1475-1484. In some embodiments, the RNA-guided nuclease is a Cas9 protein. In some embodiments, the Cas9 protein is an S. pyogenes Cas9 protein. In some embodiments, the S. pyogenes Cas9 protein comprises K848A, K1003A, and R1060A amino acid substitutions relative to the SpCas9 sequence of NCBI accession number 7S37_P. In some embodiments, the S. pyogenes Cas9 protein comprises an R691A amino acid substitution relative to the SpCas9 sequence of NCBI accession number 7S37_P.

[0421] In some embodiments, the CRISPR gene-editing system targeting the MMP10 gene is delivered to a mammalian cell via viral vector. In some embodiments, the CRISPR gene-editing system targeting the MMP10 gene is delivered to a mammalian cell via an AAV vector. In some embodiments, the CRISPR gene-editing system targeting the MMP10 gene is delivered to a mammalian cell via a lentiviral vector. In some embodiments, the CRISPR gene-editing system targeting the MMP10 gene is delivered to a mammalian cell via a lipid nanoparticle. In some embodiments, the CRISPR gene-editing system targeting the MMP10 gene is delivered to a mammalian cell via a virus-like particle. In some embodiments, the CRISPR gene-editing system targeting the MMP10 gene is delivered to a mammalian cell via a liposome. In some embodiments, the CRISPR gene-editing system targeting the MMP10 gene is delivered to a mammalian cell via a lipid nanocrystal.

[0422] In some embodiments, the pharmaceutical composition comprises an sgRNA having a crRNA sequence selected from SEQ ID NOs: 1475-1497 and a S. pyogenes Cas9 protein, optionally comprising K848A, K1003A, and R1060A amino acid substitutions or an R691A amino acid substitution, encapsulated in i) a viral vector selected from an AAV vector and a lentiviral vector; ii) a lipid nanoparticle; iii) a virus-like particle; iv) a liposome; or v) a lipid nanocrystal. In some embodiments, the pharmaceutical composition comprises an sgRNA having a crRNA sequence selected from SEQ ID NOs: 1475-1497 and a S. pyogenes Cas9 protein encapsulated in a lipid nanoparticle.

[0423] In various embodiments, the pharmaceutical composition comprising a CRISPR gene-editing system targeting the MMP10 gene is used in a method of treating a mammal in need thereof. In some embodiments, the method treats a discogenic disease or disorder. In some embodiments, the discogenic disease or disorder is low back pain, neck pain, lumbar pain, degenerative disc disease, discogenic pain annual ligament tear, herniated disc, spinal facet joint arthritis, intervertebral disc disease, spondylosis, painful scoliosis, or spinal stenosis. In some embodiments, the discogenic disease or disorder is discogenic pain.

[0424] In some embodiments, a method is provided for treating a discogenic disease or disorder by administering a therapeutically affective amount of a pharmaceutical composition comprising a CRISPR gene-editing system targeting the MMP10 gene, as described herein, to a subject in need thereof. In some embodiments, the pharmaceutical composition comprises an LNP encapsuling an sgRNA having a crRNA sequence selected from SEQ ID NOs: 1475-1497 and a S. pyogenes Cas9 protein. In some embodiments, the crRNA sequence is selected from SEQ ID NOs: 1475-1484. In some embodiments, the pharmaceutical composition is administered by intradiscal injection.

[0425] In some embodiments, a method is provided for treating a musculoskeletal disease or disorder by administering a therapeutically affective amount of a pharmaceutical composition comprising a CRISPR gene-editing system targeting the MMP10 gene, as described herein, to a subject in need thereof. In some embodiments, the musculoskeletal disease or disorder is Arthritis, Infectious Intermittent joint effusion, Ankylosing spondylitis, Arthritis, Osteoarthritis, Spondylarthritis, Plantar fasciitis, Degenerative polyarthritis, Hemophilic arthropathy, Inflammatory myopathy with abundant macrophages, or Polymyositis.

[0426] In yet other embodiments, a method is provided for treating an inflammatory disease or disorder by administering a therapeutically affective amount of a pharmaceutical composition comprising a CRISPR gene-editing system targeting the MMP10 gene, as described herein, to a subject in need thereof. In some embodiments, the inflammatory disease or disorder is Autoinflammatory Disease (AID), Cryopyrin Associated Periodic syndrome (CAPS), Familial Mediterranean Fever (FMF), TNF-Receptor Associated Periodic Syndrome (TRAPS), Hyper-IgD Syndrome (HIDS), Systemic Lupus Erythematosus (SLE), or Fibrosis (general).

[0427] In certain embodiments, any region of an MMP10 gene (e.g., 5′ untranslated region [UTR], exon 1, exon 2, exon 3, exon 4, exon 5, exon 6, exon 7, exon 8, exon 9, exon 10, any intervening intronic regions, intron/exon junctions, the 3′ UTR, or polyadenylation signal) is targeted by an RNA-guided nuclease to alter the gene. In some embodiments, the MMP10 gene targeted by an RNA-guided nuclease is from a mammal. In some embodiments, the MMP10 gene targeted by an RNA-guided nuclease is from a human (hMMP10). In some embodiments, the MMP10 gene targeted by an RNA-guided nuclease is from a dog (cMMP10). In some embodiments, the MMP10 gene targeted by an RNA-guided nuclease is from a horse (eMMP10). In some embodiments, the MMP10 gene targeted by an RNA-guided nuclease is from a cat (fMMP10).

### L. MMP12

[0428] In one aspect, methods and pharmaceutical compositions are provided for treating a back or spine condition or disorder by administering a therapeutically effective amount of a CRISPR pharmaceutical composition that targets an MMP12 gene to a subject in need thereof. In some embodiments, the CRISPR pharmaceutical composition comprises an RNA-guided nuclease and an sgRNA targeting the MMP12 gene with a crRNA sequence selected from SEQ ID NOs: 1498-1541. In some embodiments, the crRNA sequence is selected from SEQ ID NOs: 1498-1522. In some embodiments, the crRNA sequence is selected from 1498-1507. In some embodiments, the RNA-guided nuclease is a Cas9 protein. In some embodiments, the Cas9 protein is an S. pyogenes Cas9 protein. In some embodiments, the S. pyogenes Cas9 protein comprises K848A, K1003A, and R1060A amino acid substitutions relative to the SpCas9 sequence of NCBI accession number 7S37_P. In some embodiments, the S. pyogenes Cas9 protein comprises an R691A amino acid substitution relative to the SpCas9 sequence of NCBI accession number 7S37_P.

[0429] In some embodiments, the CRISPR gene-editing system targeting the MMP12 gene is delivered to a mammalian cell via viral vector. In some embodiments, the CRISPR gene-editing system targeting the MMP12 gene is delivered to a mammalian cell via an AAV vector. In some embodiments, the CRISPR gene-editing system targeting the MMP12 gene is delivered to a mammalian cell via a lentiviral vector. In some embodiments, the CRISPR gene-editing system targeting the MMP12 gene is delivered to a mammalian cell via a lipid nanoparticle. In some embodiments, the CRISPR gene-editing system targeting the MMP12 gene is delivered to a mammalian cell via a virus-like particle. In some embodiments, the CRISPR gene-editing system targeting the MMP12 gene is delivered to a mammalian cell via a liposome. In some embodiments, the CRISPR gene-editing system targeting the MMP12 gene is delivered to a mammalian cell via a lipid nanocrystal.

[0430] In some embodiments, the pharmaceutical composition comprises an sgRNA having a crRNA sequence selected from SEQ ID NOs: 1498-1541 and a S. pyogenes Cas9 protein, optionally comprising K848A, K1003A, and R1060A amino acid substitutions or an R691A amino acid substitution, encapsulated in i) a viral vector selected from an AAV vector and a lentiviral vector; ii) a lipid nanoparticle; iii) a virus-like particle; iv) a liposome; or v) a lipid nanocrystal. In some embodiments, the pharmaceutical composition comprises an sgRNA having a crRNA sequence selected from SEQ ID NOs: 1498-1541 and a S. pyogenes Cas9 protein encapsulated in a lipid nanoparticle.

[0431] In various embodiments, the pharmaceutical composition comprising a CRISPR gene-editing system targeting the MMP12 gene is used in a method of treating a mammal in need thereof. In some embodiments, the method treats a discogenic disease or disorder. In some embodiments, the discogenic disease or disorder is low back pain, neck pain, lumbar pain, degenerative disc disease, discogenic pain annual ligament tear, herniated disc, spinal facet joint arthritis, intervertebral disc disease, spondylosis, painful scoliosis, or spinal stenosis. In some embodiments, the discogenic disease or disorder is discogenic pain.

[0432] In some embodiments, a method is provided for treating a discogenic disease or disorder by administering a therapeutically affective amount of a pharmaceutical composition comprising a CRISPR gene-editing system targeting the MMP12 gene, as described herein, to a subject in need thereof. In some embodiments, the pharmaceutical composition comprises an LNP encapsuling an sgRNA having a crRNA sequence selected from SEQ ID NOs: 1498-1541 and a S. pyogenes Cas9 protein. In some embodiments, the crRNA sequence is selected from SEQ ID NOs: 1498-1522. In some embodiments, the crRNA sequence is selected from SEQ ID NOs: 1498-1507. In some embodiments, the pharmaceutical composition is administered by intradiscal injection.

[0433] In some embodiments, a method is provided for treating a musculoskeletal disease or disorder by administering a therapeutically affective amount of a pharmaceutical composition comprising a CRISPR gene-editing system targeting the MMP12 gene, as described herein, to a subject in need thereof. In some embodiments, the musculoskeletal disease or disorder is Arthritis, Infectious Intermittent joint effusion, Ankylosing spondylitis, Arthritis, Osteoarthritis, Spondylarthritis, Plantar fasciitis, Degenerative polyarthritis, Hemophilic arthropathy, Inflammatory myopathy with abundant macrophages, or Polymyositis.

[0434] In yet other embodiments, a method is provided for treating an inflammatory disease or disorder by administering a therapeutically affective amount of a pharmaceutical composition comprising a CRISPR gene-editing system targeting the MMP12 gene, as described herein, to a subject in need thereof. In some embodiments, the inflammatory disease or disorder is Autoinflammatory Disease (AID), Cryopyrin Associated Periodic syndrome (CAPS), Familial Mediterranean Fever (FMF), TNF-Receptor Associated Periodic Syndrome (TRAPS), Hyper-IgD Syndrome (HIDS), Systemic Lupus Erythematosus (SLE), or Fibrosis (general).

[0435] In certain embodiments, any region of an MMP12 gene (e.g., 5′ untranslated region [UTR], exon 1, exon 2, exon 3, exon 4, exon 5, exon 6, exon 7, exon 8, exon 9, exon 10, exon 11, exon 12, exon 13, exon 14, any intervening intronic regions, intron/exon junctions, the 3′ UTR, or polyadenylation signal) is targeted by an RNA-guided nuclease to alter the gene. In some embodiments, the MMP12 gene targeted by an RNA-guided nuclease is from a mammal. In some embodiments, the MMP12 gene targeted by an RNA-guided nuclease is from a human (hMMP12). In some embodiments, the MMP12 gene targeted by an RNA-guided nuclease is from a dog (cMMP12). In some embodiments, the MMP12 gene targeted by an RNA-guided nuclease is from ahorse (eMMP12). In some embodiments, the MMP12 gene targeted by an RNA-guided nuclease is from a cat (fMMP12).

### M. MMP13

[0436] In one aspect, methods and pharmaceutical compositions are provided for treating a back or spine condition or disorder by administering a therapeutically effective amount of a CRISPR pharmaceutical composition that targets an MMP13 gene to a subject in need thereof. In some embodiments, the CRISPR pharmaceutical composition comprises an RNA-guided nuclease and an sgRNA targeting the MMP13 gene with a crRNA sequence selected from SEQ ID NOs: 1542-1568. In some embodiments, the crRNA sequence is selected from 1542-1566. In some embodiments, the crRNA sequence is selected from 1542-1551. In some embodiments, the RNA-guided nuclease is a Cas9 protein. In some embodiments, the Cas9 protein is an S. pyogenes Cas9 protein. In some embodiments, the S. pyogenes Cas9 protein comprises K848A, K1003A, and R1060A amino acid substitutions relative to the SpCas9 sequence of NCBI accession number 7S37_P. In some embodiments, the S. pyogenes Cas9 protein comprises an R691A amino acid substitution relative to the SpCas9 sequence of NCBI accession number 7S37_P.

[0437] In some embodiments, the CRISPR gene-editing system targeting the MMP13 gene is delivered to a mammalian cell via viral vector. In some embodiments, the CRISPR gene-editing system targeting the MMP13 gene is delivered to a mammalian cell via an AAV vector. In some embodiments, the CRISPR gene-editing system targeting the MMP13 gene is delivered to a mammalian cell via a lentiviral vector. In some embodiments, the CRISPR gene-editing system targeting the MMP13 gene is delivered to a mammalian cell via a lipid nanoparticle. In some embodiments, the CRISPR gene-editing system targeting the MMP13 gene is delivered to a mammalian cell via a virus-like particle. In some embodiments, the CRISPR gene-editing system targeting the MMP13 gene is delivered to a mammalian cell via a liposome. In some embodiments, the CRISPR gene-editing system targeting the MMP13 gene is delivered to a mammalian cell via a lipid nanocrystal.

[0438] In some embodiments, the pharmaceutical composition comprises an sgRNA having a crRNA sequence selected from SEQ ID NOs: 1542-1568 and a S. pyogenes Cas9 protein, optionally comprising K848A, K1003A, and R1060A amino acid substitutions or an R691A amino acid substitution, encapsulated in i) a viral vector selected from an AAV vector and a lentiviral vector; ii) a lipid nanoparticle; iii) a virus-like particle; iv) a liposome; or v) a lipid nanocrystal. In some embodiments, the pharmaceutical composition comprises an sgRNA having a crRNA sequence selected from SEQ ID NOs: 1542-1568 and a S. pyogenes Cas9 protein encapsulated in a lipid nanoparticle.

[0439] In various embodiments, the pharmaceutical composition comprising a CRISPR gene-editing system targeting the MMP13 gene is used in a method of treating a mammal in need thereof. In some embodiments, the method treats a discogenic disease or disorder. In some embodiments, the discogenic disease or disorder is low back pain, neck pain, lumbar pain, degenerative disc disease, discogenic pain annual ligament tear, herniated disc, spinal facet joint arthritis, intervertebral disc disease, spondylosis, painful scoliosis, or spinal stenosis. In some embodiments, the discogenic disease or disorder is discogenic pain.

[0440] In some embodiments, a method is provided for treating a discogenic disease or disorder by administering a therapeutically affective amount of a pharmaceutical composition comprising a CRISPR gene-editing system targeting the MMP13 gene, as described herein, to a subject in need thereof. In some embodiments, the pharmaceutical composition comprises an LNP encapsuling an sgRNA having a crRNA sequence selected from SEQ ID NOs: 1542-1568 and a S. pyogenes Cas9 protein. In some embodiments, the crRNA sequence is selected from SEQ ID NOs: 1542-1566. In some embodiments, the crRNA sequence is selected from SEQ ID NOs: 1542-1551. In some embodiments, the pharmaceutical composition is administered by intradiscal injection.

[0441] In some embodiments, a method is provided for treating a musculoskeletal disease or disorder by administering a therapeutically affective amount of a pharmaceutical composition comprising a CRISPR gene-editing system targeting the MMP13 gene, as described herein, to a subject in need thereof. In some embodiments, the musculoskeletal disease or disorder is Arthritis, Infectious Intermittent joint effusion, Ankylosing spondylitis, Arthritis, Osteoarthritis, Spondylarthritis, Plantar fasciitis, Degenerative polyarthritis, Hemophilic arthropathy, Inflammatory myopathy with abundant macrophages, or Polymyositis.

[0442] In yet other embodiments, a method is provided for treating an inflammatory disease or disorder by administering a therapeutically affective amount of a pharmaceutical composition comprising a CRISPR gene-editing system targeting the MMP13 gene, as described herein, to a subject in need thereof. In some embodiments, the inflammatory disease or disorder is Autoinflammatory Disease (AID), Cryopyrin Associated Periodic syndrome (CAPS), Familial Mediterranean Fever (FMF), TNF-Receptor Associated Periodic Syndrome (TRAPS), Hyper-IgD Syndrome (HIDS), Systemic Lupus Erythematosus (SLE), or Fibrosis (general).

[0443] In certain embodiments, any region of an MMP13 gene (e.g., 5′ untranslated region [UTR], exon 1, exon 2, exon 3, exon 4, exon 5, exon 6, exon 7, exon 8, exon 9, exon 10, any intervening intronic regions, intron/exon junctions, the 3′ UTR, or polyadenylation signal) is targeted by an RNA-guided nuclease to alter the gene. In some embodiments, the MMP13 gene targeted by an RNA-guided nuclease is from a mammal. In some embodiments, the MMP13 gene targeted by an RNA-guided nuclease is from a human (hMMP13). In some embodiments, the MMP13 gene targeted by an RNA-guided nuclease is from a dog (cMMP13). In some embodiments, the MMP13 gene targeted by an RNA-guided nuclease is from a horse (eMMP13). In some embodiments, the MMP13 gene targeted by an RNA-guided nuclease is from a cat (fMMP13).

### N. TIMP1

[0444] In one aspect, methods and pharmaceutical compositions are provided for treating a back or spine condition or disorder by administering a therapeutically effective amount of a CRISPR pharmaceutical composition that targets an TIMP1 gene to a subject in need thereof. In some embodiments, the CRISPR pharmaceutical composition comprises an RNA-guided nuclease and an sgRNA targeting the TIMP1 gene with a crRNA sequence selected from SEQ ID NOs: 2470-2509. In some embodiments, the crRNA sequence is selected from SEQ ID NOs: 2470-2494. In some embodiments, the crRNA sequence is selected from 2470-2479. In some embodiments, the RNA-guided nuclease is a Cas9 protein. In some embodiments, the Cas9 protein is an S. pyogenes Cas9 protein. In some embodiments, the S. pyogenes Cas9 protein comprises K848A, K1003A, and R1060A amino acid substitutions relative to the SpCas9 sequence of NCBI accession number 7S37_P. In some embodiments, the S. pyogenes Cas9 protein comprises an R691A amino acid substitution relative to the SpCas9 sequence of NCBI accession number 7S37_P.

[0445] In some embodiments, the CRISPR gene-editing system targeting the TIMP1 gene is delivered to a mammalian cell via viral vector. In some embodiments, the CRISPR gene-editing system targeting the TIMP1 gene is delivered to a mammalian cell via an AAV vector. In some embodiments, the CRISPR gene-editing system targeting the TIMP1 gene is delivered to a mammalian cell via a lentiviral vector. In some embodiments, the CRISPR gene-editing system targeting the TIMP1 gene is delivered to a mammalian cell via a lipid nanoparticle. In some embodiments, the CRISPR gene-editing system targeting the TIMP1 gene is delivered to a mammalian cell via a virus-like particle. In some embodiments, the CRISPR gene-editing system targeting the TIMP1 gene is delivered to a mammalian cell via a liposome. In some embodiments, the CRISPR gene-editing system targeting the TIMP1 gene is delivered to a mammalian cell via a lipid nanocrystal.

[0446] In some embodiments, the pharmaceutical composition comprises an sgRNA having a crRNA sequence selected from SEQ ID NOs: 2470-2509 and a S. pyogenes Cas9 protein, optionally comprising K848A, K1003A, and R1060A amino acid substitutions or an R691A amino acid substitution, encapsulated in i) a viral vector selected from an AAV vector and a lentiviral vector; ii) a lipid nanoparticle; iii) a virus-like particle; iv) a liposome; or v) a lipid nanocrystal. In some embodiments, the pharmaceutical composition comprises an sgRNA having a crRNA sequence selected from SEQ ID NOs: 2470-2509 and a S. pyogenes Cas9 protein encapsulated in a lipid nanoparticle.

[0447] In various embodiments, the pharmaceutical composition comprising a CRISPR gene-editing system targeting the TIMP1 gene is used in a method of treating a mammal in need thereof. In some embodiments, the method treats a discogenic disease or disorder. In some embodiments, the discogenic disease or disorder is low back pain, neck pain, lumbar pain, degenerative disc disease, discogenic pain annual ligament tear, herniated disc, spinal facet joint arthritis, intervertebral disc disease, spondylosis, painful scoliosis, or spinal stenosis. In some embodiments, the discogenic disease or disorder is discogenic pain.

[0448] In some embodiments, a method is provided for treating a discogenic disease or disorder by administering a therapeutically affective amount of a pharmaceutical composition comprising a CRISPR gene-editing system targeting the TIMP1 gene, as described herein, to a subject in need thereof. In some embodiments, the pharmaceutical composition comprises an LNP encapsuling an sgRNA having a crRNA sequence selected from SEQ ID NOs: 2470-2509 and a S. pyogenes Cas9 protein. In some embodiments, the crRNA sequence is selected from SEQ ID NOs: 2470-2494. In some embodiments, the crRNA sequence is selected from SEQ ID NOs: 2470-2479. In some embodiments, the pharmaceutical composition is administered by intradiscal injection.

[0449] In some embodiments, a method is provided for treating a musculoskeletal disease or disorder by administering a therapeutically affective amount of a pharmaceutical composition comprising a CRISPR gene-editing system targeting the TIMP1 gene, as described herein, to a subject in need thereof. In some embodiments, the musculoskeletal disease or disorder is Arthritis, Infectious Intermittent joint effusion, Ankylosing spondylitis, Arthritis, Osteoarthritis, Spondylarthritis, Plantar fasciitis, Degenerative polyarthritis, Hemophilic arthropathy, Inflammatory myopathy with abundant macrophages, or Polymyositis.

[0450] In yet other embodiments, a method is provided for treating an inflammatory disease or disorder by administering a therapeutically affective amount of a pharmaceutical composition comprising a CRISPR gene-editing system targeting the TIMP1 gene, as described herein, to a subject in need thereof. In some embodiments, the inflammatory disease or disorder is Autoinflammatory Disease (AID), Cryopyrin Associated Periodic syndrome (CAPS), Familial Mediterranean Fever (FMF), TNF-Receptor Associated Periodic Syndrome (TRAPS), Hyper-IgD Syndrome (HIDS), Systemic Lupus Erythematosus (SLE), or Fibrosis (general).

[0451] In certain embodiments, any region of an TIMP1 gene (e.g., 5′ untranslated region [UTR], exon 1, exon 2, exon 3, exon 4, exon 5, exon 6, any intervening intronic regions, intron/exon junctions, the 3′ UTR, or polyadenylation signal) is targeted by an RNA-guided nuclease to alter the gene. In some embodiments, the TIMP1 gene targeted by an RNA-guided nuclease is from a mammal. In some embodiments, the TIMP1 gene targeted by an RNA-guided nuclease is from a human (hTIMP1). In some embodiments, the TIMP1 gene targeted by an RNA-guided nuclease is from a dog (cTIMP1). In some embodiments, the TIMP1 gene targeted by an RNA-guided nuclease is from a horse (eTIMP1). In some embodiments, the TIMP1 gene targeted by an RNA-guided nuclease is from a cat (fTIMP1).

### O. TIMP3

[0452] In one aspect, methods and pharmaceutical compositions are provided for treating a back or spine condition or disorder by administering a therapeutically effective amount of a CRISPR pharmaceutical composition that targets an TIMP3 gene to a subject in need thereof. In some embodiments, the CRISPR pharmaceutical composition comprises an RNA-guided nuclease and an sgRNA targeting the TIMP3 gene with a crRNA sequence selected from SEQ ID NOs: 2510-2557. In some embodiments, the crRNA sequence is selected from SEQ ID NOs: 2510-2534. In some embodiments, the crRNA sequence is selected from 2510-2519. In some embodiments, the RNA-guided nuclease is a Cas9 protein. In some embodiments, the Cas9 protein is an S. pyogenes Cas9 protein. In some embodiments, the S. pyogenes Cas9 protein comprises K848A, K1003A, and R1060A amino acid substitutions relative to the SpCas9 sequence of NCBI accession number 7S37_P. In some embodiments, the S. pyogenes Cas9 protein comprises an R691A amino acid substitution relative to the SpCas9 sequence of NCBI accession number 7S37_P.

[0453] In some embodiments, the CRISPR gene-editing system targeting the TIMP3 gene is delivered to a mammalian cell via viral vector. In some embodiments, the CRISPR gene-editing system targeting the TIMP3 gene is delivered to a mammalian cell via an AAV vector. In some embodiments, the CRISPR gene-editing system targeting the TIMP3 gene is delivered to a mammalian cell via a lentiviral vector. In some embodiments, the CRISPR gene-editing system targeting the TIMP3 gene is delivered to a mammalian cell via a lipid nanoparticle. In some embodiments, the CRISPR gene-editing system targeting the TIMP3 gene is delivered to a mammalian cell via a virus-like particle. In some embodiments, the CRISPR gene-editing system targeting the TIMP3 gene is delivered to a mammalian cell via a liposome. In some embodiments, the CRISPR gene-editing system targeting the TIMP3 gene is delivered to a mammalian cell via a lipid nanocrystal.

[0454] In some embodiments, the pharmaceutical composition comprises an sgRNA having a crRNA sequence selected from SEQ ID NOs: 2510-2557 and a S. pyogenes Cas9 protein, optionally comprising K848A, K1003A, and R1060A amino acid substitutions or an R691A amino acid substitution, encapsulated in i) a viral vector selected from an AAV vector and a lentiviral vector; ii) a lipid nanoparticle; iii) a virus-like particle; iv) a liposome; or v) a lipid nanocrystal. In some embodiments, the pharmaceutical composition comprises an sgRNA having a crRNA sequence selected from SEQ ID NOs: 2510-2557 and a S. pyogenes Cas9 protein encapsulated in a lipid nanoparticle.

[0455] In various embodiments, the pharmaceutical composition comprising a CRISPR gene-editing system targeting the TIMP3 gene is used in a method of treating a mammal in need thereof. In some embodiments, the method treats a discogenic disease or disorder. In some embodiments, the discogenic disease or disorder is low back pain, neck pain, lumbar pain, degenerative disc disease, discogenic pain annual ligament tear, herniated disc, spinal facet joint arthritis, intervertebral disc disease, spondylosis, painful scoliosis, or spinal stenosis. In some embodiments, the discogenic disease or disorder is discogenic pain.

[0456] In some embodiments, a method is provided for treating a discogenic disease or disorder by administering a therapeutically affective amount of a pharmaceutical composition comprising a CRISPR gene-editing system targeting the TIMP3 gene, as described herein, to a subject in need thereof. In some embodiments, the pharmaceutical composition comprises an LNP encapsuling an sgRNA having a crRNA sequence selected from SEQ ID NOs: 2510-2557 and a S. pyogenes Cas9 protein. In some embodiments, the crRNA sequence is selected from SEQ ID NOs: 2510-2534. In some embodiments, the crRNA sequence is selected from SEQ ID NOs: 2510-2519. In some embodiments, the pharmaceutical composition is administered by intradiscal injection.

[0457] In some embodiments, a method is provided for treating a musculoskeletal disease or disorder by administering a therapeutically affective amount of a pharmaceutical composition comprising a CRISPR gene-editing system targeting the TIMP3 gene, as described herein, to a subject in need thereof. In some embodiments, the musculoskeletal disease or disorder is Arthritis, Infectious Intermittent joint effusion, Ankylosing spondylitis, Arthritis, Osteoarthritis, Spondylarthritis, Plantar fasciitis, Degenerative polyarthritis, Hemophilic arthropathy, Inflammatory myopathy with abundant macrophages, or Polymyositis.

[0458] In yet other embodiments, a method is provided for treating an inflammatory disease or disorder by administering a therapeutically affective amount of a pharmaceutical composition comprising a CRISPR gene-editing system targeting the TIMP3 gene, as described herein, to a subject in need thereof. In some embodiments, the inflammatory disease or disorder is Autoinflammatory Disease (AID), Cryopyrin Associated Periodic syndrome (CAPS), Familial Mediterranean Fever (FMF), TNF-Receptor Associated Periodic Syndrome (TRAPS), Hyper-IgD Syndrome (HIDS), Systemic Lupus Erythematosus (SLE), or Fibrosis (general).

[0459] In certain embodiments, any region of an TIMP3 gene (e.g., 5′ untranslated region [UTR], exon 1, exon 2, exon 3, exon 4, exon 5, exon 6, exon 7, exon 8, exon 9, exon 10, any intervening intronic regions, intron/exon junctions, the 3′ UTR, or polyadenylation signal) is targeted by an RNA-guided nuclease to alter the gene. In some embodiments, the TIMP3 gene targeted by an RNA-guided nuclease is from a mammal. In some embodiments, the TIMP3 gene targeted by an RNA-guided nuclease is from a human (hTIMP3). In some embodiments, the TIMP3 gene targeted by an RNA-guided nuclease is from a dog (cTIMP3). In some embodiments, the TIMP3 gene targeted by an RNA-guided nuclease is from a horse (eTIMP3). In some embodiments, the TIMP3 gene targeted by an RNA-guided nuclease is from a cat (fTIMP3).

### P. CXCL1

[0460] In one aspect, methods and pharmaceutical compositions are provided for treating a back or spine condition or disorder by administering a therapeutically effective amount of a CRISPR pharmaceutical composition that targets an CXCL1 gene to a subject in need thereof. In some embodiments, the CRISPR pharmaceutical composition comprises an RNA-guided nuclease and an sgRNA targeting the CXCL1 gene with a crRNA sequence selected from SEQ ID NOs: 535-551. In some embodiments, the crRNA sequence is selected from 535-544. In some embodiments, the RNA-guided nuclease is a Cas9 protein. In some embodiments, the Cas9 protein is an S. pyogenes Cas9 protein. In some embodiments, the S. pyogenes Cas9 protein comprises K848A, K1003A, and R1060A amino acid substitutions relative to the SpCas9 sequence of NCBI accession number 7S37_P. In some embodiments, the S. pyogenes Cas9 protein comprises an R691A amino acid substitution relative to the SpCas9 sequence of NCBI accession number 7S37_P.

[0461] In some embodiments, the CRISPR gene-editing system targeting the CXCL1 gene is delivered to a mammalian cell via viral vector. In some embodiments, the CRISPR gene-editing system targeting the CXCL1 gene is delivered to a mammalian cell via an AAV vector. In some embodiments, the CRISPR gene-editing system targeting the CXCL1 gene is delivered to a mammalian cell via a lentiviral vector. In some embodiments, the CRISPR gene-editing system targeting the CXCL1 gene is delivered to a mammalian cell via a lipid nanoparticle. In some embodiments, the CRISPR gene-editing system targeting the CXCL1 gene is delivered to a mammalian cell via a virus-like particle. In some embodiments, the CRISPR gene-editing system targeting the CXCL1 gene is delivered to a mammalian cell via a liposome. In some embodiments, the CRISPR gene-editing system targeting the CXCL1 gene is delivered to a mammalian cell via a lipid nanocrystal.

[0462] In some embodiments, the pharmaceutical composition comprises an sgRNA having a crRNA sequence selected from SEQ ID NOs: 535-551 and a S. pyogenes Cas9 protein, optionally comprising K848A, K1003A, and R1060A amino acid substitutions or an R691A amino acid substitution, encapsulated in i) a viral vector selected from an AAV vector and a lentiviral vector; ii) a lipid nanoparticle; iii) a virus-like particle; iv) a liposome; or v) a lipid nanocrystal. In some embodiments, the pharmaceutical composition comprises an sgRNA having a crRNA sequence selected from SEQ ID NOs: 535-551 and a S. pyogenes Cas9 protein encapsulated in a lipid nanoparticle.

[0463] In various embodiments, the pharmaceutical composition comprising a CRISPR gene-editing system targeting the CXCL1 gene is used in a method of treating a mammal in need thereof. In some embodiments, the method treats a discogenic disease or disorder. In some embodiments, the discogenic disease or disorder is low back pain, neck pain, lumbar pain, degenerative disc disease, discogenic pain annual ligament tear, herniated disc, spinal facet joint arthritis, intervertebral disc disease, spondylosis, painful scoliosis, or spinal stenosis. In some embodiments, the discogenic disease or disorder is discogenic pain.

[0464] In some embodiments, a method is provided for treating a discogenic disease or disorder by administering a therapeutically affective amount of a pharmaceutical composition comprising a CRISPR gene-editing system targeting the CXCL1 gene, as described herein, to a subject in need thereof. In some embodiments, the pharmaceutical composition comprises an LNP encapsuling an sgRNA having a crRNA sequence selected from SEQ ID NOs: 535-551 and a S. pyogenes Cas9 protein. In some embodiments, the crRNA sequence is selected from SEQ ID NOs: 535-544. In some embodiments, the pharmaceutical composition is administered by intradiscal injection.

[0465] In some embodiments, a method is provided for treating a musculoskeletal disease or disorder by administering a therapeutically affective amount of a pharmaceutical composition comprising a CRISPR gene-editing system targeting the CXCL1 gene, as described herein, to a subject in need thereof. In some embodiments, the musculoskeletal disease or disorder is Arthritis. Infectious Intermittent joint effusion, Ankylosing spondylitis, Arthritis, Osteoarthritis, Spondylarthritis, Plantar fasciitis, Degenerative polyarthritis, Hemophilic arthropathy, Inflammatory myopathy with abundant macrophages, or Polymyositis.

[0466] In yet other embodiments, a method is provided for treating an inflammatory disease or disorder by administering a therapeutically affective amount of a pharmaceutical composition comprising a CRISPR gene-editing system targeting the CXCL1 gene, as described herein, to a subject in need thereof. In some embodiments, the inflammatory disease or disorder is Autoinflammatory Disease (AID), Cryopyrin Associated Periodic syndrome (CAPS), Familial Mediterranean Fever (FMF), TNF-Receptor Associated Periodic Syndrome (TRAPS), Hyper-IgD Syndrome (HIDS), Systemic Lupus Erythematosus (SLE), or Fibrosis (general).

[0467] In certain embodiments, any region of an CXCL1 gene (e.g., 5′ untranslated region [UTR], exon 1, exon 2, exon 3, exon 4, any intervening intronic regions, intron/exon junctions, the 3′ UTR, or polyadenylation signal) is targeted by an RNA-guided nuclease to alter the gene. In some embodiments, the CXCL1 gene targeted by an RNA-guided nuclease is from a mammal. In some embodiments, the CXCL1 gene targeted by an RNA-guided nuclease is from a human (hCXCL1). In some embodiments, the CXCL1 gene targeted by an RNA-guided nuclease is from a dog (cCXCL1). In some embodiments, the CXCL1 gene targeted by an RNA-guided nuclease is from a horse (eCXCL1). In some embodiments, the CXCL1 gene targeted by an RNA-guided nuclease is from a cat (fCXCL1).

### Q. CXCL2

[0468] In one aspect, methods and pharmaceutical compositions are provided for treating a back or spine condition or disorder by administering a therapeutically effective amount of a CRISPR pharmaceutical composition that targets an CXCL2 gene to a subject in need thereof. In some embodiments, the CRISPR pharmaceutical composition comprises an RNA-guided nuclease and an sgRNA targeting the CXCL2 gene with a crRNA sequence selected from SEQ ID NOs: 552-568. In some embodiments, the crRNA sequence is selected from 552-561. In some embodiments, the RNA-guided nuclease is a Cas9 protein. In some embodiments, the Cas9 protein is an S. pyogenes Cas9 protein. In some embodiments, the S. pyogenes Cas9 protein comprises K848A, K1003A, and R1060A amino acid substitutions relative to the SpCas9 sequence of NCBI accession number 7S37_P. In some embodiments, the S. pyogenes Cas9 protein comprises an R691A amino acid substitution relative to the SpCas9 sequence of NCBI accession number 7S37_P.

[0469] In some embodiments, the CRISPR gene-editing system targeting the CXCL2 gene is delivered to a mammalian cell via viral vector. In some embodiments, the CRISPR gene-editing system targeting the CXCL2 gene is delivered to a mammalian cell via an AAV vector. In some embodiments, the CRISPR gene-editing system targeting the CXCL2 gene is delivered to a mammalian cell via a lentiviral vector. In some embodiments, the CRISPR gene-editing system targeting the CXCL2 gene is delivered to a mammalian cell via a lipid nanoparticle. In some embodiments, the CRISPR gene-editing system targeting the CXCL2 gene is delivered to a mammalian cell via a virus-like particle. In some embodiments, the CRISPR gene-editing system targeting the CXCL2 gene is delivered to a mammalian cell via a liposome. In some embodiments, the CRISPR gene-editing system targeting the CXCL2 gene is delivered to a mammalian cell via a lipid nanocrystal.

[0470] In some embodiments, the pharmaceutical composition comprises an sgRNA having a crRNA sequence selected from SEQ ID NOs: 552-568 and a S. pyogenes Cas9 protein, optionally comprising K848A, K1003A, and R1060A amino acid substitutions or an R691A amino acid substitution, encapsulated in i) a viral vector selected from an AAV vector and a lentiviral vector; ii) a lipid nanoparticle; iii) a virus-like particle; iv) a liposome; or v) a lipid nanocrystal. In some embodiments, the pharmaceutical composition comprises an sgRNA having a crRNA sequence selected from SEQ ID NOs: 552-568 and a S. pyogenes Cas9 protein encapsulated in a lipid nanoparticle.

[0471] In various embodiments, the pharmaceutical composition comprising a CRISPR gene-editing system targeting the CXCL2 gene is used in a method of treating a mammal in need thereof. In some embodiments, the method treats a discogenic disease or disorder. In some embodiments, the discogenic disease or disorder is low back pain, neck pain, lumbar pain, degenerative disc disease, discogenic pain annual ligament tear, herniated disc, spinal facet joint arthritis, intervertebral disc disease, spondylosis, painful scoliosis, or spinal stenosis. In some embodiments, the discogenic disease or disorder is discogenic pain.

[0472] In some embodiments, a method is provided for treating a discogenic disease or disorder by administering a therapeutically affective amount of a pharmaceutical composition comprising a CRISPR gene-editing system targeting the CXCL2 gene, as described herein, to a subject in need thereof. In some embodiments, the pharmaceutical composition comprises an LNP encapsuling an sgRNA having a crRNA sequence selected from SEQ ID NOs: 552-568 and a S. pyogenes Cas9 protein. In some embodiments, the crRNA sequence is selected from SEQ ID NOs: 552-561. In some embodiments, the pharmaceutical composition is administered by intradiscal injection.

[0473] In some embodiments, a method is provided for treating a musculoskeletal disease or disorder by administering a therapeutically affective amount of a pharmaceutical composition comprising a CRISPR gene-editing system targeting the CXCL2 gene, as described herein, to a subject in need thereof. In some embodiments, the musculoskeletal disease or disorder is Arthritis, Infectious Intermittent joint effusion, Ankylosing spondylitis, Arthritis, Osteoarthritis, Spondylarthritis, Plantar fasciitis, Degenerative polyarthritis, Hemophilic arthropathy, Inflammatory myopathy with abundant macrophages, or Polymyositis.

[0474] In yet other embodiments, a method is provided for treating an inflammatory disease or disorder by administering a therapeutically affective amount of a pharmaceutical composition comprising a CRISPR gene-editing system targeting the CXCL2 gene, as described herein, to a subject in need thereof. In some embodiments, the inflammatory disease or disorder is Autoinflammatory Disease (AID), Cryopyrin Associated Periodic syndrome (CAPS), Familial Mediterranean Fever (FMF), TNF-Receptor Associated Periodic Syndrome (TRAPS), Hyper-IgD Syndrome (HIDS), Systemic Lupus Erythematosus (SLE), or Fibrosis (general).

[0475] In certain embodiments, any region of an CXCL2 gene (e.g., 5′ untranslated region [UTR], exon 1, exon 2, exon 3, exon 4, any intervening intronic regions, intron/exon junctions, the 3′ UTR, or polyadenylation signal) is targeted by an RNA-guided nuclease to alter the gene. In some embodiments, the CXCL2 gene targeted by an RNA-guided nuclease is from a mammal. In some embodiments, the CXCL2 gene targeted by an RNA-guided nuclease is from a human (hCXCL2). In some embodiments, the CXCL2 gene targeted by an RNA-guided nuclease is from a dog (cCXCL2). In some embodiments, the CXCL2 gene targeted by an RNA-guided nuclease is from a horse (eCXCL2). In some embodiments, the CXCL2 gene targeted by an RNA-guided nuclease is from a cat (fCXCL2).

### R. CXCL3

[0476] In one aspect, methods and pharmaceutical compositions are provided for treating a back or spine condition or disorder by administering a therapeutically effective amount of a CRISPR pharmaceutical composition that targets an CXCL3 gene to a subject in need thereof. In some embodiments, the CRISPR pharmaceutical composition comprises an RNA-guided nuclease and an sgRNA targeting the CXCL3 gene with a crRNA sequence selected from SEQ ID NOs: 569-585. In some embodiments, the crRNA sequence is selected from 569-578. In some embodiments, the RNA-guided nuclease is a Cas9 protein. In some embodiments, the Cas9 protein is an S. pyogenes Cas9 protein. In some embodiments, the S. pyogenes Cas9 protein comprises K848A, K1003A, and R1060A amino acid substitutions relative to the SpCas9 sequence of NCBI accession number 7S37_P. In some embodiments, the S. pyogenes Cas9 protein comprises an R691A amino acid substitution relative to the SpCas9 sequence of NCBI accession number 7S37_P.

[0477] In some embodiments, the CRISPR gene-editing system targeting the CXCL3 gene is delivered to a mammalian cell via viral vector. In some embodiments, the CRISPR gene-editing system targeting the CXCL3 gene is delivered to a mammalian cell via an AAV vector. In some embodiments, the CRISPR gene-editing system targeting the CXCL3 gene is delivered to a mammalian cell via a lentiviral vector. In some embodiments, the CRISPR gene-editing system targeting the CXCL3 gene is delivered to a mammalian cell via a lipid nanoparticle. In some embodiments, the CRISPR gene-editing system targeting the CXCL3 gene is delivered to a mammalian cell via a virus-like particle. In some embodiments, the CRISPR gene-editing system targeting the CXCL3 gene is delivered to a mammalian cell via a liposome. In some embodiments, the CRISPR gene-editing system targeting the CXCL3 gene is delivered to a mammalian cell via a lipid nanocrystal.

[0478] In some embodiments, the pharmaceutical composition comprises an sgRNA having a crRNA sequence selected from SEQ ID NOs: 569-585 and a S. pyogenes Cas9 protein, optionally comprising K848A, K1003A, and R1060A amino acid substitutions or an R691A amino acid substitution, encapsulated in i) a viral vector selected from an AAV vector and a lentiviral vector; ii) a lipid nanoparticle; iii) a virus-like particle; iv) a liposome; or v) a lipid nanocrystal. In some embodiments, the pharmaceutical composition comprises an sgRNA having a crRNA sequence selected from SEQ ID NOs: 569-585 and a S. pyogenes Cas9 protein encapsulated in a lipid nanoparticle.

[0479] In various embodiments, the pharmaceutical composition comprising a CRISPR gene-editing system targeting the CXCL3 gene is used in a method of treating a mammal in need thereof. In some embodiments, the method treats a discogenic disease or disorder. In some embodiments, the discogenic disease or disorder is low back pain, neck pain, lumbar pain, degenerative disc disease, discogenic pain annual ligament tear, herniated disc, spinal facet joint arthritis, intervertebral disc disease, spondylosis, painful scoliosis, or spinal stenosis. In some embodiments, the discogenic disease or disorder is discogenic pain.

[0480] In some embodiments, a method is provided for treating a discogenic disease or disorder by administering a therapeutically affective amount of a pharmaceutical composition comprising a CRISPR gene-editing system targeting the CXCL3 gene, as described herein, to a subject in need thereof. In some embodiments, the pharmaceutical composition comprises an LNP encapsuling an sgRNA having a crRNA sequence selected from SEQ ID NOs: 569-585 and a S. pyogenes Cas9 protein. In some embodiments, the crRNA sequence is selected from SEQ ID NOs: 569-578. In some embodiments, the pharmaceutical composition is administered by intradiscal injection.

[0481] In some embodiments, a method is provided for treating a musculoskeletal disease or disorder by administering a therapeutically affective amount of a pharmaceutical composition comprising a CRISPR gene-editing system targeting the CXCL3 gene, as described herein, to a subject in need thereof. In some embodiments, the musculoskeletal disease or disorder is Arthritis, Infectious Intermittent joint effusion, Ankylosing spondylitis, Arthritis, Osteoarthritis, Spondylarthritis, Plantar fasciitis, Degenerative polyarthritis, Hemophilic arthropathy, Inflammatory myopathy with abundant macrophages, or Polymyositis.

[0482] In yet other embodiments, a method is provided for treating an inflammatory disease or disorder by administering a therapeutically affective amount of a pharmaceutical composition comprising a CRISPR gene-editing system targeting the CXCL3 gene, as described herein, to a subject in need thereof. In some embodiments, the inflammatory disease or disorder is Autoinflammatory Disease (AID), Cryopyrin Associated Periodic syndrome (CAPS), Familial Mediterranean Fever (FMF), TNF-Receptor Associated Periodic Syndrome (TRAPS), Hyper-IgD Syndrome (HIDS), Systemic Lupus Erythematosus (SLE), or Fibrosis (general).

[0483] In certain embodiments, any region of an CXCL3 gene (e.g., 5′ untranslated region [UTR], exon 1, exon 2, exon 3, exon 4, any intervening intronic regions, intron/exon junctions, the 3′ UTR, or polyadenylation signal) is targeted by an RNA-guided nuclease to alter the gene. In some embodiments, the CXCL3 gene targeted by an RNA-guided nuclease is from a mammal. In some embodiments, the CXCL3 gene targeted by an RNA-guided nuclease is from a human (hCXCL3). In some embodiments, the CXCL3 gene targeted by an RNA-guided nuclease is from a dog (cCXCL3). In some embodiments, the CXCL3 gene targeted by an RNA-guided nuclease is from a horse (eCXCL3). In some embodiments, the CXCL3 gene targeted by an RNA-guided nuclease is from a cat (fCXCL3).

### S. CXCL5

[0484] In one aspect, methods and pharmaceutical compositions are provided for treating a back or spine condition or disorder by administering a therapeutically effective amount of a CRISPR pharmaceutical composition that targets an CXCL5 gene to a subject in need thereof. In some embodiments, the CRISPR pharmaceutical composition comprises an RNA-guided nuclease and an sgRNA targeting the CXCL5 gene with a crRNA sequence selected from SEQ ID NOs: 586-602. In some embodiments, the crRNA sequence is selected from 586-595. In some embodiments, the RNA-guided nuclease is a Cas9 protein. In some embodiments, the Cas9 protein is an S. pyogenes Cas9 protein. In some embodiments, the S. pyogenes Cas9 protein comprises K848A, K1003A, and R1060A amino acid substitutions relative to the SpCas9 sequence of NCBI accession number 7S37_P. In some embodiments, the S. pyogenes Cas9 protein comprises an R691A amino acid substitution relative to the SpCas9 sequence of NCBI accession number 7S37_P.

[0485] In some embodiments, the CRISPR gene-editing system targeting the CXCL5 gene is delivered to a mammalian cell via viral vector. In some embodiments, the CRISPR gene-editing system targeting the CXCL5 gene is delivered to a mammalian cell via an AAV vector. In some embodiments, the CRISPR gene-editing system targeting the CXCL5 gene is delivered to a mammalian cell via a lentiviral vector. In some embodiments, the CRISPR gene-editing system targeting the CXCL5 gene is delivered to a mammalian cell via a lipid nanoparticle. In some embodiments, the CRISPR gene-editing system targeting the CXCL5 gene is delivered to a mammalian cell via a virus-like particle. In some embodiments, the CRISPR gene-editing system targeting the CXCL5 gene is delivered to a mammalian cell via a liposome. In some embodiments, the CRISPR gene-editing system targeting the CXCL5 gene is delivered to a mammalian cell via a lipid nanocrystal.

[0486] In some embodiments, the pharmaceutical composition comprises an sgRNA having a crRNA sequence selected from SEQ ID NOs: 586-602 and a S. pyogenes Cas9 protein, optionally comprising K848A, K1003A, and R1060A amino acid substitutions or an R691A amino acid substitution, encapsulated in i) a viral vector selected from an AAV vector and a lentiviral vector; ii) a lipid nanoparticle; iii) a virus-like particle; iv) a liposome; or v) a lipid nanocrystal. In some embodiments, the pharmaceutical composition comprises an sgRNA having a crRNA sequence selected from SEQ ID NOs: 586-602 and a S. pyogenes Cas9 protein encapsulated in a lipid nanoparticle.

[0487] In various embodiments, the pharmaceutical composition comprising a CRISPR gene-editing system targeting the CXCL5 gene is used in a method of treating a mammal in need thereof. In some embodiments, the method treats a discogenic disease or disorder. In some embodiments, the discogenic disease or disorder is low back pain, neck pain, lumbar pain, degenerative disc disease, discogenic pain annual ligament tear, herniated disc, spinal facet joint arthritis, intervertebral disc disease, spondylosis, painful scoliosis, or spinal stenosis. In some embodiments, the discogenic disease or disorder is discogenic pain.

[0488] In some embodiments, a method is provided for treating a discogenic disease or disorder by administering a therapeutically affective amount of a pharmaceutical composition comprising a CRISPR gene-editing system targeting the CXCL5 gene, as described herein, to a subject in need thereof. In some embodiments, the pharmaceutical composition comprises an LNP encapsuling an sgRNA having a crRNA sequence selected from SEQ ID NOs: 586-602 and a S. pyogenes Cas9 protein. In some embodiments, the crRNA sequence is selected from SEQ ID NOs: 586-595. In some embodiments, the pharmaceutical composition is administered by intradiscal injection.

[0489] In some embodiments, a method is provided for treating a musculoskeletal disease or disorder by administering a therapeutically affective amount of a pharmaceutical composition comprising a CRISPR gene-editing system targeting the CXCL5 gene, as described herein, to a subject in need thereof. In some embodiments, the musculoskeletal disease or disorder is Arthritis, Infectious Intermittent joint effusion, Ankylosing spondylitis, Arthritis, Osteoarthritis, Spondylarthritis, Plantar fasciitis, Degenerative polyarthritis, Hemophilic arthropathy, Inflammatory myopathy with abundant macrophages, or Polymyositis.

[0490] In yet other embodiments, a method is provided for treating an inflammatory disease or disorder by administering a therapeutically affective amount of a pharmaceutical composition comprising a CRISPR gene-editing system targeting the CXCL5 gene, as described herein, to a subject in need thereof. In some embodiments, the inflammatory disease or disorder is Autoinflammatory Disease (AID), Cryopyrin Associated Periodic syndrome (CAPS), Familial Mediterranean Fever (FMF), TNF-Receptor Associated Periodic Syndrome (TRAPS), Hyper-IgD Syndrome (HIDS), Systemic Lupus Erythematosus (SLE), or Fibrosis (general).

[0491] In certain embodiments, any region of an CXCL5 gene (e.g., 5′ untranslated region [UTR], exon 1, exon 2, exon 3, exon 4, any intervening intronic regions, intron/exon junctions, the 3′ UTR, or polyadenylation signal) is targeted by an RNA-guided nuclease to alter the gene. In some embodiments, the CXCL5 gene targeted by an RNA-guided nuclease is from a mammal. In some embodiments, the CXCL5 gene targeted by an RNA-guided nuclease is from a human (hCXCL5). In some embodiments, the CXCL5 gene targeted by an RNA-guided nuclease is from a dog (cCXCL5). In some embodiments, the CXCL5 gene targeted by an RNA-guided nuclease is from a horse (eCXCL5). In some embodiments, the CXCL5 gene targeted by an RNA-guided nuclease is from a cat (fCXCL5).

### T. CXCL6

[0492] In one aspect, methods and pharmaceutical compositions are provided for treating a back or spine condition or disorder by administering a therapeutically effective amount of a CRISPR pharmaceutical composition that targets an CXCL6 gene to a subject in need thereof. In some embodiments, the CRISPR pharmaceutical composition comprises an RNA-guided nuclease and an sgRNA targeting the CXCL6 gene with a crRNA sequence selected from SEQ ID NOs: 603-619. In some embodiments, the crRNA sequence is selected from 603-612. In some embodiments, the RNA-guided nuclease is a Cas9 protein. In some embodiments, the Cas9 protein is an S. pyogenes Cas9 protein. In some embodiments, the S. pyogenes Cas9 protein comprises K848A, K1003A, and R1060A amino acid substitutions relative to the SpCas9 sequence of NCBI accession number 7S37_P. In some embodiments, the S. pyogenes Cas9 protein comprises an R691A amino acid substitution relative to the SpCas9 sequence of NCBI accession number 7S37_P.

[0493] In some embodiments, the CRISPR gene-editing system targeting the CXCL6 gene is delivered to a mammalian cell via viral vector. In some embodiments, the CRISPR gene-editing system targeting the CXCL6 gene is delivered to a mammalian cell via an AAV vector. In some embodiments, the CRISPR gene-editing system targeting the CXCL6 gene is delivered to a mammalian cell via a lentiviral vector. In some embodiments, the CRISPR gene-editing system targeting the CXCL6 gene is delivered to a mammalian cell via a lipid nanoparticle. In some embodiments, the CRISPR gene-editing system targeting the CXCL6 gene is delivered to a mammalian cell via a virus-like particle. In some embodiments, the CRISPR gene-editing system targeting the CXCL6 gene is delivered to a mammalian cell via a liposome. In some embodiments, the CRISPR gene-editing system targeting the CXCL6 gene is delivered to a mammalian cell via a lipid nanocrystal.

[0494] In some embodiments, the pharmaceutical composition comprises an sgRNA having a crRNA sequence selected from SEQ ID NOs: 603-619 and a S. pyogenes Cas9 protein, optionally comprising K848A, K1003A, and R1060A amino acid substitutions or an R691A amino acid substitution, encapsulated in i) a viral vector selected from an AAV vector and a lentiviral vector; ii) a lipid nanoparticle; iii) a virus-like particle; iv) a liposome; or v) a lipid nanocrystal. In some embodiments, the pharmaceutical composition comprises an sgRNA having a crRNA sequence selected from SEQ ID NOs: 603-619 and a S. pyogenes Cas9 protein encapsulated in a lipid nanoparticle.

[0495] In various embodiments, the pharmaceutical composition comprising a CRISPR gene-editing system targeting the CXCL6 gene is used in a method of treating a mammal in need thereof. In some embodiments, the method treats a discogenic disease or disorder. In some embodiments, the discogenic disease or disorder is low back pain, neck pain, lumbar pain, degenerative disc disease, discogenic pain annual ligament tear, herniated disc, spinal facet joint arthritis, intervertebral disc disease, spondylosis, painful scoliosis, or spinal stenosis. In some embodiments, the discogenic disease or disorder is discogenic pain.

[0496] In some embodiments, a method is provided for treating a discogenic disease or disorder by administering a therapeutically affective amount of a pharmaceutical composition comprising a CRISPR gene-editing system targeting the CXCL6 gene, as described herein, to a subject in need thereof. In some embodiments, the pharmaceutical composition comprises an LNP encapsuling an sgRNA having a crRNA sequence selected from SEQ ID NOs: 603-619 and a S. pyogenes Cas9 protein. In some embodiments, the crRNA sequence is selected from SEQ ID NOs: 603-612. In some embodiments, the pharmaceutical composition is administered by intradiscal injection.

[0497] In some embodiments, a method is provided for treating a musculoskeletal disease or disorder by administering a therapeutically affective amount of a pharmaceutical composition comprising a CRISPR gene-editing system targeting the CXCL6 gene, as described herein, to a subject in need thereof. In some embodiments, the musculoskeletal disease or disorder is Arthritis, Infectious Intermittent joint effusion, Ankylosing spondylitis, Arthritis, Osteoarthritis, Spondylarthritis, Plantar fasciitis, Degenerative polyarthritis, Hemophilic arthropathy, Inflammatory myopathy with abundant macrophages, or Polymyositis.

[0498] In yet other embodiments, a method is provided for treating an inflammatory disease or disorder by administering a therapeutically affective amount of a pharmaceutical composition comprising a CRISPR gene-editing system targeting the CXCL6 gene, as described herein, to a subject in need thereof. In some embodiments, the inflammatory disease or disorder is Autoinflammatory Disease (AID), Cryopyrin Associated Periodic syndrome (CAPS), Familial Mediterranean Fever (FMF), TNF-Receptor Associated Periodic Syndrome (TRAPS), Hyper-IgD Syndrome (HIDS), Systemic Lupus Erythematosus (SLE), or Fibrosis (general).

[0499] In certain embodiments, any region of an CXCL6 gene (e.g., 5′ untranslated region [UTR], exon 1, exon 2, exon 3, exon 4, any intervening intronic regions, intron/exon junctions, the 3′ UTR, or polyadenylation signal) is targeted by an RNA-guided nuclease to alter the gene. In some embodiments, the CXCL6 gene targeted by an RNA-guided nuclease is from a mammal. In some embodiments, the CXCL6 gene targeted by an RNA-guided nuclease is from a human (hCXCL6). In some embodiments, the CXCL6 gene targeted by an RNA-guided nuclease is from a dog (cCXCL6). In some embodiments, the CXCL6 gene targeted by an RNA-guided nuclease is from a horse (eCXCL6). In some embodiments, the CXCL6 gene targeted by an RNA-guided nuclease is from a cat (fCXCL6).

### U. CXCL8

[0500] In one aspect, methods and pharmaceutical compositions are provided for treating a back or spine condition or disorder by administering a therapeutically effective amount of a CRISPR pharmaceutical composition that targets an CXCL8 gene to a subject in need thereof. In some embodiments, the CRISPR pharmaceutical composition comprises an RNA-guided nuclease and an sgRNA targeting the CXCL8 gene with a crRNA sequence selected from SEQ ID NOs: 620-636. In some embodiments, the crRNA sequence is selected from 620-629. In some embodiments, the RNA-guided nuclease is a Cas9 protein. In some embodiments, the Cas9 protein is an S. pyogenes Cas9 protein. In some embodiments, the S. pyogenes Cas9 protein comprises K848A, K1003A, and R1060A amino acid substitutions relative to the SpCas9 sequence of NCBI accession number 7S37_P. In some embodiments, the S. pyogenes Cas9 protein comprises an R691A amino acid substitution relative to the SpCas9 sequence of NCBI accession number 7S37_P.

[0501] In some embodiments, the CRISPR gene-editing system targeting the CXCL8 gene is delivered to a mammalian cell via viral vector. In some embodiments, the CRISPR gene-editing system targeting the CXCL8 gene is delivered to a mammalian cell via an AAV vector. In some embodiments, the CRISPR gene-editing system targeting the CXCL8 gene is delivered to a mammalian cell via a lentiviral vector. In some embodiments, the CRISPR gene-editing system targeting the CXCL8 gene is delivered to a mammalian cell via a lipid nanoparticle. In some embodiments, the CRISPR gene-editing system targeting the CXCL8 gene is delivered to a mammalian cell via a virus-like particle. In some embodiments, the CRISPR gene-editing system targeting the CXCL8 gene is delivered to a mammalian cell via a liposome. In some embodiments, the CRISPR gene-editing system targeting the CXCL8 gene is delivered to a mammalian cell via a lipid nanocrystal.

[0502] In some embodiments, the pharmaceutical composition comprises an sgRNA having a crRNA sequence selected from SEQ ID NOs: 620-636 and a S. pyogenes Cas9 protein, optionally comprising K848A, K1003A, and R1060A amino acid substitutions or an R691A amino acid substitution, encapsulated in i) a viral vector selected from an AAV vector and a lentiviral vector; ii) a lipid nanoparticle; iii) a virus-like particle; iv) a liposome; or v) a lipid nanocrystal. In some embodiments, the pharmaceutical composition comprises an sgRNA having a crRNA sequence selected from SEQ ID NOs: 620-636 and a S. pyogenes Cas9 protein encapsulated in a lipid nanoparticle.

[0503] In various embodiments, the pharmaceutical composition comprising a CRISPR gene-editing system targeting the CXCL8 gene is used in a method of treating a mammal in need thereof. In some embodiments, the method treats a discogenic disease or disorder. In some embodiments, the discogenic disease or disorder is low back pain, neck pain, lumbar pain, degenerative disc disease, discogenic pain annual ligament tear, herniated disc, spinal facet joint arthritis, intervertebral disc disease, spondylosis, painful scoliosis, or spinal stenosis. In some embodiments, the discogenic disease or disorder is discogenic pain.

[0504] In some embodiments, a method is provided for treating a discogenic disease or disorder by administering a therapeutically affective amount of a pharmaceutical composition comprising a CRISPR gene-editing system targeting the CXCL8 gene, as described herein, to a subject in need thereof. In some embodiments, the pharmaceutical composition comprises an LNP encapsuling an sgRNA having a crRNA sequence selected from SEQ ID NOs: 620-636 and a S. pyogenes Cas9 protein. In some embodiments, the crRNA sequence is selected from SEQ ID NOs: 620-629. In some embodiments, the pharmaceutical composition is administered by intradiscal injection.

[0505] In some embodiments, a method is provided for treating a musculoskeletal disease or disorder by administering a therapeutically affective amount of a pharmaceutical composition comprising a CRISPR gene-editing system targeting the CXCL8 gene, as described herein, to a subject in need thereof. In some embodiments, the musculoskeletal disease or disorder is Arthritis, Infectious Intermittent joint effusion, Ankylosing spondylitis, Arthritis, Osteoarthritis, Spondylarthritis, Plantar fasciitis, Degenerative polyarthritis, Hemophilic arthropathy, Inflammatory myopathy with abundant macrophages, or Polymyositis.

[0506] In yet other embodiments, a method is provided for treating an inflammatory disease or disorder by administering a therapeutically affective amount of a pharmaceutical composition comprising a CRISPR gene-editing system targeting the CXCL8 gene, as described herein, to a subject in need thereof. In some embodiments, the inflammatory disease or disorder is Autoinflammatory Disease (AID), Cryopyrin Associated Periodic syndrome (CAPS), Familial Mediterranean Fever (FMF), TNF-Receptor Associated Periodic Syndrome (TRAPS), Hyper-IgD Syndrome (HIDS), Systemic Lupus Erythematosus (SLE), or Fibrosis (general).

[0507] In certain embodiments, any region of an CXCL8 gene (e.g., 5′ untranslated region [UTR], exon 1, exon 2, exon 3, exon 4, any intervening intronic regions, intron/exon junctions, the 3′ UTR, or polyadenylation signal) is targeted by an RNA-guided nuclease to alter the gene. In some embodiments, the CXCL8 gene targeted by an RNA-guided nuclease is from a mammal. In some embodiments, the CXCL8 gene targeted by an RNA-guided nuclease is from a human (hCXCL8). In some embodiments, the CXCL8 gene targeted by an RNA-guided nuclease is from a dog (cCXCL8). In some embodiments, the CXCL8 gene targeted by an RNA-guided nuclease is from a horse (eCXCL8). In some embodiments, the CXCL8 gene targeted by an RNA-guided nuclease is from a cat (fCXCL8).

### V. CCL2

[0508] In one aspect, methods and pharmaceutical compositions are provided for treating a back or spine condition or disorder by administering a therapeutically effective amount of a CRISPR pharmaceutical composition that targets an CCL2 gene to a subject in need thereof. In some embodiments, the CRISPR pharmaceutical composition comprises an RNA-guided nuclease and an sgRNA targeting the CCL2 gene with a crRNA sequence selected from SEQ ID NOs: 341-357. In some embodiments, the crRNA sequence is selected from 341-350. In some embodiments, the RNA-guided nuclease is a Cas9 protein. In some embodiments, the Cas9 protein is an S. pyogenes Cas9 protein. In some embodiments, the S. pyogenes Cas9 protein comprises K848A, K1003A, and R1060A amino acid substitutions relative to the SpCas9 sequence of NCBI accession number 7S37_P. In some embodiments, the S. pyogenes Cas9 protein comprises an R691A amino acid substitution relative to the SpCas9 sequence of NCBI accession number 7S37_P.

[0509] In some embodiments, the CRISPR gene-editing system targeting the CCL2 gene is delivered to a mammalian cell via viral vector. In some embodiments, the CRISPR gene-editing system targeting the CCL2 gene is delivered to a mammalian cell via an AAV vector. In some embodiments, the CRISPR gene-editing system targeting the CCL2 gene is delivered to a mammalian cell via a lentiviral vector. In some embodiments, the CRISPR gene-editing system targeting the CCL2 gene is delivered to a mammalian cell via a lipid nanoparticle. In some embodiments, the CRISPR gene-editing system targeting the CCL2 gene is delivered to a mammalian cell via a virus-like particle. In some embodiments, the CRISPR gene-editing system targeting the CCL2 gene is delivered to a mammalian cell via a liposome. In some embodiments, the CRISPR gene-editing system targeting the CCL2 gene is delivered to a mammalian cell via a lipid nanocrystal.

[0510] In some embodiments, the pharmaceutical composition comprises an sgRNA having a crRNA sequence selected from SEQ ID NOs: 341-357 and a S. pyogenes Cas9 protein, optionally comprising K848A, K1003A, and R1060A amino acid substitutions or an R691A amino acid substitution, encapsulated in i) a viral vector selected from an AAV vector and a lentiviral vector; ii) a lipid nanoparticle; iii) a virus-like particle; iv) a liposome; or v) a lipid nanocrystal. In some embodiments, the pharmaceutical composition comprises an sgRNA having a crRNA sequence selected from SEQ ID NOs: 341-357 and a S. pyogenes Cas9 protein encapsulated in a lipid nanoparticle.

[0511] In various embodiments, the pharmaceutical composition comprising a CRISPR gene-editing system targeting the CCL2 gene is used in a method of treating a mammal in need thereof. In some embodiments, the method treats a discogenic disease or disorder. In some embodiments, the discogenic disease or disorder is low back pain, neck pain, lumbar pain, degenerative disc disease, discogenic pain annual ligament tear, herniated disc, spinal facet joint arthritis, intervertebral disc disease, spondylosis, painful scoliosis, or spinal stenosis. In some embodiments, the discogenic disease or disorder is discogenic pain.

[0512] In some embodiments, a method is provided for treating a discogenic disease or disorder by administering a therapeutically affective amount of a pharmaceutical composition comprising a CRISPR gene-editing system targeting the CCL2 gene, as described herein, to a subject in need thereof. In some embodiments, the pharmaceutical composition comprises an LNP encapsuling an sgRNA having a crRNA sequence selected from SEQ ID NOs: 341-357 and a S. pyogenes Cas9 protein. In some embodiments, the crRNA sequence is selected from SEQ ID NOs: 341-350. In some embodiments, the pharmaceutical composition is administered by intradiscal injection.

[0513] In some embodiments, a method is provided for treating a musculoskeletal disease or disorder by administering a therapeutically affective amount of a pharmaceutical composition comprising a CRISPR gene-editing system targeting the CCL2 gene, as described herein, to a subject in need thereof. In some embodiments, the musculoskeletal disease or disorder is Arthritis, Infectious Intermittent joint effusion, Ankylosing spondylitis, Arthritis, Osteoarthritis, Spondylarthritis, Plantar fasciitis, Degenerative polyarthritis, Hemophilic arthropathy, Inflammatory myopathy with abundant macrophages, or Polymyositis.

[0514] In yet other embodiments, a method is provided for treating an inflammatory disease or disorder by administering a therapeutically affective amount of a pharmaceutical composition comprising a CRISPR gene-editing system targeting the CCL2 gene, as described herein, to a subject in need thereof. In some embodiments, the inflammatory disease or disorder is Autoinflammatory Disease (AID), Cryopyrin Associated Periodic syndrome (CAPS), Familial Mediterranean Fever (FMF), TNF-Receptor Associated Periodic Syndrome (TRAPS), Hyper-IgD Syndrome (HIDS), Systemic Lupus Erythematosus (SLE), or Fibrosis (general).

[0515] In certain embodiments, any region of an CCL2 gene (e.g., 5′ untranslated region [UTR], exon 1, exon 2, exon 3, any intervening intronic regions, intron/exon junctions, the 3′ UTR, or polyadenylation signal) is targeted by an RNA-guided nuclease to alter the gene. In some embodiments, the CCL2 gene targeted by an RNA-guided nuclease is from a mammal. In some embodiments, the CCL2 gene targeted by an RNA-guided nuclease is from a human (hCCL2). In some embodiments, the CCL2 gene targeted by an RNA-guided nuclease is from a dog (cCCL2). In some embodiments, the CCL2 gene targeted by an RNA-guided nuclease is from a horse (eCCL2). In some embodiments, the CCL2 gene targeted by an RNA-guided nuclease is from a cat (fCCL2).

### W. CCL3

[0516] In one aspect, methods and pharmaceutical compositions are provided for treating a back or spine condition or disorder by administering a therapeutically effective amount of a CRISPR pharmaceutical composition that targets an CCL3 gene to a subject in need thereof. In some embodiments, the CRISPR pharmaceutical composition comprises an RNA-guided nuclease and an sgRNA targeting the CCL3 gene with a crRNA sequence selected from SEQ ID NOs: 358-374. In some embodiments, the crRNA sequence is selected from 358-367. In some embodiments, the RNA-guided nuclease is a Cas9 protein. In some embodiments, the Cas9 protein is an S. pyogenes Cas9 protein. In some embodiments, the S. pyogenes Cas9 protein comprises K848A, K1003A, and R1060A amino acid substitutions relative to the SpCas9 sequence of NCBI accession number 7537_P. In some embodiments, the S. pyogenes Cas9 protein comprises an R691A amino acid substitution relative to the SpCas9 sequence of NCBI accession number 7S37_P.

[0517] In some embodiments, the CRISPR gene-editing system targeting the CCL3 gene is delivered to a mammalian cell via viral vector. In some embodiments, the CRISPR gene-editing system targeting the CCL3 gene is delivered to a mammalian cell via an AAV vector. In some embodiments, the CRISPR gene-editing system targeting the CCL3 gene is delivered to a mammalian cell via a lentiviral vector. In some embodiments, the CRISPR gene-editing system targeting the CCL3 gene is delivered to a mammalian cell via a lipid nanoparticle. In some embodiments, the CRISPR gene-editing system targeting the CCL3 gene is delivered to a mammalian cell via a virus-like particle. In some embodiments, the CRISPR gene-editing system targeting the CCL3 gene is delivered to a mammalian cell via a liposome. In some embodiments, the CRISPR gene-editing system targeting the CCL3 gene is delivered to a mammalian cell via a lipid nanocrystal.

[0518] In some embodiments, the pharmaceutical composition comprises an sgRNA having a crRNA sequence selected from SEQ ID NOs: 358-374 and a S. pyogenes Cas9 protein, optionally comprising K848A, K1003A, and R1060A amino acid substitutions or an R691A amino acid substitution, encapsulated in i) a viral vector selected from an AAV vector and a lentiviral vector; ii) a lipid nanoparticle; iii) a virus-like particle; iv) a liposome; or v) a lipid nanocrystal. In some embodiments, the pharmaceutical composition comprises an sgRNA having a crRNA sequence selected from SEQ ID NOs: 358-374 and a S. pyogenes Cas9 protein encapsulated in a lipid nanoparticle.

[0519] In various embodiments, the pharmaceutical composition comprising a CRISPR gene-editing system targeting the CCL3 gene is used in a method of treating a mammal in need thereof. In some embodiments, the method treats a discogenic disease or disorder. In some embodiments, the discogenic disease or disorder is low back pain, neck pain, lumbar pain, degenerative disc disease, discogenic pain annual ligament tear, herniated disc, spinal facet joint arthritis, intervertebral disc disease, spondylosis, painful scoliosis, or spinal stenosis. In some embodiments, the discogenic disease or disorder is discogenic pain.

[0520] In some embodiments, a method is provided for treating a discogenic disease or disorder by administering a therapeutically affective amount of a pharmaceutical composition comprising a CRISPR gene-editing system targeting the CCL3 gene, as described herein, to a subject in need thereof. In some embodiments, the pharmaceutical composition comprises an LNP encapsuling an sgRNA having a crRNA sequence selected from SEQ ID NOs: 358-374 and a S. pyogenes Cas9 protein. In some embodiments, the crRNA sequence is selected from SEQ ID NOs: 358-367. In some embodiments, the pharmaceutical composition is administered by intradiscal injection.

[0521] In some embodiments, a method is provided for treating a musculoskeletal disease or disorder by administering a therapeutically affective amount of a pharmaceutical composition comprising a CRISPR gene-editing system targeting the CCL3 gene, as described herein, to a subject in need thereof. In some embodiments, the musculoskeletal disease or disorder is Arthritis, Infectious Intermittent joint effusion, Ankylosing spondylitis, Arthritis, Osteoarthritis, Spondylarthritis, Plantar fasciitis, Degenerative polyarthritis, Hemophilic arthropathy, Inflammatory myopathy with abundant macrophages, or Polymyositis.

[0522] In yet other embodiments, a method is provided for treating an inflammatory disease or disorder by administering a therapeutically affective amount of a pharmaceutical composition comprising a CRISPR gene-editing system targeting the CCL3 gene, as described herein, to a subject in need thereof. In some embodiments, the inflammatory disease or disorder is Autoinflammatory Disease (AID), Cryopyrin Associated Periodic syndrome (CAPS), Familial Mediterranean Fever (FMF), TNF-Receptor Associated Periodic Syndrome (TRAPS), Hyper-IgD Syndrome (HIDS), Systemic Lupus Erythematosus (SLE), or Fibrosis (general).

[0523] In certain embodiments, any region of an CCL3 gene (e.g., 5′ untranslated region [UTR], exon 1, exon 2, exon 3, exon 4, any intervening intronic regions, intron/exon junctions, the 3′ UTR, or polyadenylation signal) is targeted by an RNA-guided nuclease to alter the gene. In some embodiments, the CCL3 gene targeted by an RNA-guided nuclease is from a mammal. In some embodiments, the CCL3 gene targeted by an RNA-guided nuclease is from a human (hCCL3). In some embodiments, the CCL3 gene targeted by an RNA-guided nuclease is from a dog (cCCL3). In some embodiments, the CCL3 gene targeted by an RNA-guided nuclease is from a horse (eCCL3). In some embodiments, the CCL3 gene targeted by an RNA-guided nuclease is from a cat (fCCL3).

### X. CCL5

[0524] In one aspect, methods and pharmaceutical compositions are provided for treating a back or spine condition or disorder by administering a therapeutically effective amount of a CRISPR pharmaceutical composition that targets an CCL5 gene to a subject in need thereof. In some embodiments, the CRISPR pharmaceutical composition comprises an RNA-guided nuclease and an sgRNA targeting the CCL5 gene with a crRNA sequence selected from SEQ ID NOs: 375-391. In some embodiments, the crRNA sequence is selected from 375-384. In some embodiments, the RNA-guided nuclease is a Cas9 protein. In some embodiments, the Cas9 protein is an S. pyogenes Cas9 protein. In some embodiments, the S. pyogenes Cas9 protein comprises K848A, K1003A, and R1060A amino acid substitutions relative to the SpCas9 sequence of NCBI accession number 7S37_P. In some embodiments, the S. pyogenes Cas9 protein comprises an R691A amino acid substitution relative to the SpCas9 sequence of NCBI accession number 7S37_P.

[0525] In some embodiments, the CRISPR gene-editing system targeting the CCL5 gene is delivered to a mammalian cell via viral vector. In some embodiments, the CRISPR gene-editing system targeting the CCL5 gene is delivered to a mammalian cell via an AAV vector. In some embodiments, the CRISPR gene-editing system targeting the CCL5 gene is delivered to a mammalian cell via a lentiviral vector. In some embodiments, the CRISPR gene-editing system targeting the CCL5 gene is delivered to a mammalian cell via a lipid nanoparticle. In some embodiments, the CRISPR gene-editing system targeting the CCL5 gene is delivered to a mammalian cell via a virus-like particle. In some embodiments, the CRISPR gene-editing system targeting the CCL5 gene is delivered to a mammalian cell via a liposome. In some embodiments, the CRISPR gene-editing system targeting the CCL5 gene is delivered to a mammalian cell via a lipid nanocrystal.

[0526] In some embodiments, the pharmaceutical composition comprises an sgRNA having a crRNA sequence selected from SEQ ID NOs: 375-391 and a S. pyogenes Cas9 protein, optionally comprising K848A, K1003A, and R1060A amino acid substitutions or an R691A amino acid substitution, encapsulated in i) a viral vector selected from an AAV vector and a lentiviral vector; ii) a lipid nanoparticle; iii) a virus-like particle; iv) a liposome; or v) a lipid nanocrystal. In some embodiments, the pharmaceutical composition comprises an sgRNA having a crRNA sequence selected from SEQ ID NOs: 375-391 and a S. pyogenes Cas9 protein encapsulated in a lipid nanoparticle.

[0527] In various embodiments, the pharmaceutical composition comprising a CRISPR gene-editing system targeting the CCL5 gene is used in a method of treating a mammal in need thereof. In some embodiments, the method treats a discogenic disease or disorder. In some embodiments, the discogenic disease or disorder is low back pain, neck pain, lumbar pain, degenerative disc disease, discogenic pain annual ligament tear, herniated disc, spinal facet joint arthritis, intervertebral disc disease, spondylosis, painful scoliosis, or spinal stenosis. In some embodiments, the discogenic disease or disorder is discogenic pain.

[0528] In some embodiments, a method is provided for treating a discogenic disease or disorder by administering a therapeutically affective amount of a pharmaceutical composition comprising a CRISPR gene-editing system targeting the CCL5 gene, as described herein, to a subject in need thereof. In some embodiments, the pharmaceutical composition comprises an LNP encapsuling an sgRNA having a crRNA sequence selected from SEQ ID NOs: 375-391 and a S. pyogenes Cas9 protein. In some embodiments, the crRNA sequence is selected from SEQ ID NOs: 375-384. In some embodiments, the pharmaceutical composition is administered by intradiscal injection.

[0529] In some embodiments, a method is provided for treating a musculoskeletal disease or disorder by administering a therapeutically affective amount of a pharmaceutical composition comprising a CRISPR gene-editing system targeting the CCL5 gene, as described herein, to a subject in need thereof. In some embodiments, the musculoskeletal disease or disorder is Arthritis, Infectious Intermittent joint effusion, Ankylosing spondylitis, Arthritis, Osteoarthritis, Spondylarthritis, Plantar fasciitis, Degenerative polyarthritis, Hemophilic arthropathy, Inflammatory myopathy with abundant macrophages, or Polymyositis.

[0530] In yet other embodiments, a method is provided for treating an inflammatory disease or disorder by administering a therapeutically affective amount of a pharmaceutical composition comprising a CRISPR gene-editing system targeting the CCL5 gene, as described herein, to a subject in need thereof. In some embodiments, the inflammatory disease or disorder is Autoinflammatory Disease (AID), Cryopyrin Associated Periodic syndrome (CAPS), Familial Mediterranean Fever (FMF), TNF-Receptor Associated Periodic Syndrome (TRAPS), Hyper-IgD Syndrome (HIDS), Systemic Lupus Erythematosus (SLE), or Fibrosis (general).

[0531] In certain embodiments, any region of an CCL5 gene (e.g., 5′ untranslated region [UTR], exon 1, exon 2, exon 3, exon 4, any intervening intronic regions, intron/exon junctions, the 3′ UTR, or polyadenylation signal) is targeted by an RNA-guided nuclease to alter the gene. In some embodiments, the CCL5 gene targeted by an RNA-guided nuclease is from a mammal. In some embodiments, the CCL5 gene targeted by an RNA-guided nuclease is from a human (hCCL5). In some embodiments, the CCL5 gene targeted by an RNA-guided nuclease is from a dog (cCCL5). In some embodiments, the CCL5 gene targeted by an RNA-guided nuclease is from a horse (eCCL5). In some embodiments, the CCL5 gene targeted by an RNA-guided nuclease is from a cat (fCCL5).

### Y. CCL7

[0532] In one aspect, methods and pharmaceutical compositions are provided for treating a back or spine condition or disorder by administering a therapeutically effective amount of a CRISPR pharmaceutical composition that targets an CCL7 gene to a subject in need thereof. In some embodiments, the CRISPR pharmaceutical composition comprises an RNA-guided nuclease and an sgRNA targeting the CCL7 gene with a crRNA sequence selected from SEQ ID NOs: 392-408. In some embodiments, the crRNA sequence is selected from 392-401. In some embodiments, the RNA-guided nuclease is a Cas9 protein. In some embodiments, the Cas9 protein is an S. pyogenes Cas9 protein. In some embodiments, the S. pyogenes Cas9 protein comprises K848A, K1003A, and R1060A amino acid substitutions relative to the SpCas9 sequence of NCBI accession number 7S37_P. In some embodiments, the S. pyogenes Cas9 protein comprises an R691A amino acid substitution relative to the SpCas9 sequence of NCBI accession number 7S37_P.

[0533] In some embodiments, the CRISPR gene-editing system targeting the CCL7 gene is delivered to a mammalian cell via viral vector. In some embodiments, the CRISPR gene-editing system targeting the CCL7 gene is delivered to a mammalian cell via an AAV vector. In some embodiments, the CRISPR gene-editing system targeting the CCL7 gene is delivered to a mammalian cell via a lentiviral vector. In some embodiments, the CRISPR gene-editing system targeting the CCL7 gene is delivered to a mammalian cell via a lipid nanoparticle. In some embodiments, the CRISPR gene-editing system targeting the CCL7 gene is delivered to a mammalian cell via a virus-like particle. In some embodiments, the CRISPR gene-editing system targeting the CCL7 gene is delivered to a mammalian cell via a liposome. In some embodiments, the CRISPR gene-editing system targeting the CCL7 gene is delivered to a mammalian cell via a lipid nanocrystal.

[0534] In some embodiments, the pharmaceutical composition comprises an sgRNA having a crRNA sequence selected from SEQ ID NOs: 392-408 and a S. pyogenes Cas9 protein, optionally comprising K848A, K1003A, and R1060A amino acid substitutions or an R691A amino acid substitution, encapsulated in i) a viral vector selected from an AAV vector and a lentiviral vector; ii) a lipid nanoparticle; iii) a virus-like particle; iv) a liposome; or v) a lipid nanocrystal. In some embodiments, the pharmaceutical composition comprises an sgRNA having a crRNA sequence selected from SEQ ID NOs: 392-408 and a S. pyogenes Cas9 protein encapsulated in a lipid nanoparticle.

[0535] In various embodiments, the pharmaceutical composition comprising a CRISPR gene-editing system targeting the CCL7 gene is used in a method of treating a mammal in need thereof. In some embodiments, the method treats a discogenic disease or disorder. In some embodiments, the discogenic disease or disorder is low back pain, neck pain, lumbar pain, degenerative disc disease, discogenic pain annual ligament tear, herniated disc, spinal facet joint arthritis, intervertebral disc disease, spondylosis, painful scoliosis, or spinal stenosis. In some embodiments, the discogenic disease or disorder is discogenic pain.

[0536] In some embodiments, a method is provided for treating a discogenic disease or disorder by administering a therapeutically affective amount of a pharmaceutical composition comprising a CRISPR gene-editing system targeting the CCL7 gene, as described herein, to a subject in need thereof. In some embodiments, the pharmaceutical composition comprises an LNP encapsuling an sgRNA having a crRNA sequence selected from SEQ ID NOs: 392-408 and a S. pyogenes Cas9 protein. In some embodiments, the crRNA sequence is selected from SEQ ID NOs: 392-401. In some embodiments, the pharmaceutical composition is administered by intradiscal injection.

[0537] In some embodiments, a method is provided for treating a musculoskeletal disease or disorder by administering a therapeutically affective amount of a pharmaceutical composition comprising a CRISPR gene-editing system targeting the CCL7 gene, as described herein, to a subject in need thereof. In some embodiments, the musculoskeletal disease or disorder is Arthritis, Infectious Intermittent joint effusion, Ankylosing spondylitis, Arthritis, Osteoarthritis, Spondylarthritis, Plantar fasciitis, Degenerative polyarthritis, Hemophilic arthropathy, Inflammatory myopathy with abundant macrophages, or Polymyositis.

[0538] In yet other embodiments, a method is provided for treating an inflammatory disease or disorder by administering a therapeutically affective amount of a pharmaceutical composition comprising a CRISPR gene-editing system targeting the CCL7 gene, as described herein, to a subject in need thereof. In some embodiments, the inflammatory disease or disorder is Autoinflammatory Disease (AID), Cryopyrin Associated Periodic syndrome (CAPS), Familial Mediterranean Fever (FMF), TNF-Receptor Associated Periodic Syndrome (TRAPS), Hyper-IgD Syndrome (HIDS), Systemic Lupus Erythematosus (SLE), or Fibrosis (general).

[0539] In certain embodiments, any region of an CCL7 gene (e.g., 5′ untranslated region [UTR], exon 1, exon 2, exon 3, any intervening intronic regions, intron/exon junctions, the 3′ UTR, or polyadenylation signal) is targeted by an RNA-guided nuclease to alter the gene. In some embodiments, the CCL7 gene targeted by an RNA-guided nuclease is from a mammal. In some embodiments, the CCL7 gene targeted by an RNA-guided nuclease is from a human (hCCL7). In some embodiments, the CCL7 gene targeted by an RNA-guided nuclease is from a dog (cCCL7). In some embodiments, the CCL7 gene targeted by an RNA-guided nuclease is from a horse (eCCL7). In some embodiments, the CCL7 gene targeted by an RNA-guided nuclease is from a cat (fCCL7).

### Z. CCL20

[0540] In one aspect, methods and pharmaceutical compositions are provided for treating a back or spine condition or disorder by administering a therapeutically effective amount of a CRISPR pharmaceutical composition that targets an CCL20 gene to a subject in need thereof. In some embodiments, the CRISPR pharmaceutical composition comprises an RNA-guided nuclease and an sgRNA targeting the CCL20 gene with a crRNA sequence selected from SEQ ID NOs: 409-425. In some embodiments, the crRNA sequence is selected from 409-418. In some embodiments, the RNA-guided nuclease is a Cas9 protein. In some embodiments, the Cas9 protein is an S. pyogenes Cas9 protein. In some embodiments, the S. pyogenes Cas9 protein comprises K848A, K1003A, and R1060A amino acid substitutions relative to the SpCas9 sequence of NCBI accession number 7S37_P. In some embodiments, the S. pyogenes Cas9 protein comprises an R691A amino acid substitution relative to the SpCas9 sequence of NCBI accession number 7S37_P.

[0541] In some embodiments, the CRISPR gene-editing system targeting the CCL20 gene is delivered to a mammalian cell via viral vector. In some embodiments, the CRISPR gene-editing system targeting the CCL20 gene is delivered to a mammalian cell via an AAV vector. In some embodiments, the CRISPR gene-editing system targeting the CCL20 gene is delivered to a mammalian cell via a lentiviral vector. In some embodiments, the CRISPR gene-editing system targeting the CCL20 gene is delivered to a mammalian cell via a lipid nanoparticle. In some embodiments, the CRISPR gene-editing system targeting the CCL20 gene is delivered to a mammalian cell via a virus-like particle. In some embodiments, the CRISPR gene-editing system targeting the CCL20 gene is delivered to a mammalian cell via a liposome. In some embodiments, the CRISPR gene-editing system targeting the CCL20 gene is delivered to a mammalian cell via a lipid nanocrystal.

[0542] In some embodiments, the pharmaceutical composition comprises an sgRNA having a crRNA sequence selected from SEQ ID NOs: 409-425 and a S. pyogenes Cas9 protein, optionally comprising K848A, K1003A, and R1060A amino acid substitutions or an R691A amino acid substitution, encapsulated in i) a viral vector selected from an AAV vector and a lentiviral vector; ii) a lipid nanoparticle; iii) a virus-like particle; iv) a liposome; or v) a lipid nanocrystal. In some embodiments, the pharmaceutical composition comprises an sgRNA having a crRNA sequence selected from SEQ ID NOs: 409-425 and a S. pyogenes Cas9 protein encapsulated in a lipid nanoparticle.

[0543] In various embodiments, the pharmaceutical composition comprising a CRISPR gene-editing system targeting the CCL20 gene is used in a method of treating a mammal in need thereof. In some embodiments, the method treats a discogenic disease or disorder. In some embodiments, the discogenic disease or disorder is low back pain, neck pain, lumbar pain, degenerative disc disease, discogenic pain annual ligament tear, herniated disc, spinal facet joint arthritis, intervertebral disc disease, spondylosis, painful scoliosis, or spinal stenosis. In some embodiments, the discogenic disease or disorder is discogenic pain.

[0544] In some embodiments, a method is provided for treating a discogenic disease or disorder by administering a therapeutically affective amount of a pharmaceutical composition comprising a CRISPR gene-editing system targeting the CCL20 gene, as described herein, to a subject in need thereof. In some embodiments, the pharmaceutical composition comprises an LNP encapsuling an sgRNA having a crRNA sequence selected from SEQ ID NOs: 409-425 and a S. pyogenes Cas9 protein. In some embodiments, the crRNA sequence is selected from SEQ ID NOs: 409-418. In some embodiments, the pharmaceutical composition is administered by intradiscal injection.

[0545] In some embodiments, a method is provided for treating a musculoskeletal disease or disorder by administering a therapeutically affective amount of a pharmaceutical composition comprising a CRISPR gene-editing system targeting the CCL20 gene, as described herein, to a subject in need thereof. In some embodiments, the musculoskeletal disease or disorder is Arthritis, Infectious Intermittent joint effusion, Ankylosing spondylitis, Arthritis, Osteoarthritis, Spondylarthritis, Plantar fasciitis, Degenerative polyarthritis, Hemophilic arthropathy, Inflammatory myopathy with abundant macrophages, or Polymyositis.

[0546] In yet other embodiments, a method is provided for treating an inflammatory disease or disorder by administering a therapeutically affective amount of a pharmaceutical composition comprising a CRISPR gene-editing system targeting the CCL20 gene, as described herein, to a subject in need thereof. In some embodiments, the inflammatory disease or disorder is Autoinflammatory Disease (AID), Cryopyrin Associated Periodic syndrome (CAPS), Familial Mediterranean Fever (FMF), TNF-Receptor Associated Periodic Syndrome (TRAPS), Hyper-IgD Syndrome (HIDS), Systemic Lupus Erythematosus (SLE), or Fibrosis (general).

[0547] In certain embodiments, any region of an CCL20 gene (e.g., 5′ untranslated region [UTR], exon 1, exon 2, exon 3, exon 4, any intervening intronic regions, intron/exon junctions, the 3′ UTR, or polyadenylation signal) is targeted by an RNA-guided nuclease to alter the gene. In some embodiments, the CCL20 gene targeted by an RNA-guided nuclease is from a mammal. In some embodiments, the CCL20 gene targeted by an RNA-guided nuclease is from a human (hCCL20). In some embodiments, the CCL20 gene targeted by an RNA-guided nuclease is from a dog (cCCL20). In some embodiments, the CCL20 gene targeted by an RNA-guided nuclease is from a horse (eCCL20). In some embodiments, the CCL20 gene targeted by an RNA-guided nuclease is from a cat (fCCL20).

### AA. CXCR1

[0548] In one aspect, methods and pharmaceutical compositions are provided for treating a back or spine condition or disorder by administering a therapeutically effective amount of a CRISPR pharmaceutical composition that targets an CXCR1 gene to a subject in need thereof. In some embodiments, the CRISPR pharmaceutical composition comprises an RNA-guided nuclease and an sgRNA targeting the CXCR1 gene with a crRNA sequence selected from SEQ ID NOs: 637-655. In some embodiments, the crRNA sequence is selected from 637-646. In some embodiments, the RNA-guided nuclease is a Cas9 protein. In some embodiments, the Cas9 protein is an S. pyogenes Cas9 protein. In some embodiments, the S. pyogenes Cas9 protein comprises K848A, K1003A, and R1060A amino acid substitutions relative to the SpCas9 sequence of NCBI accession number 7S37_P. In some embodiments, the S. pyogenes Cas9 protein comprises an R691A amino acid substitution relative to the SpCas9 sequence of NCBI accession number 7S37_P.

[0549] In some embodiments, the CRISPR gene-editing system targeting the CXCR1 gene is delivered to a mammalian cell via viral vector. In some embodiments, the CRISPR gene-editing system targeting the CXCR1 gene is delivered to a mammalian cell via an AAV vector. In some embodiments, the CRISPR gene-editing system targeting the CXCR1 gene is delivered to a mammalian cell via a lentiviral vector. In some embodiments, the CRISPR gene-editing system targeting the CXCR1 gene is delivered to a mammalian cell via a lipid nanoparticle. In some embodiments, the CRISPR gene-editing system targeting the CXCR1 gene is delivered to a mammalian cell via a virus-like particle. In some embodiments, the CRISPR gene-editing system targeting the CXCR1 gene is delivered to a mammalian cell via a liposome. In some embodiments, the CRISPR gene-editing system targeting the CXCR1 gene is delivered to a mammalian cell via a lipid nanocrystal.

[0550] In some embodiments, the pharmaceutical composition comprises an sgRNA having a crRNA sequence selected from SEQ ID NOs: 637-655 and a S. pyogenes Cas9 protein, optionally comprising K848A, K1003A, and R1060A amino acid substitutions or an R691A amino acid substitution, encapsulated in i) a viral vector selected from an AAV vector and a lentiviral vector; ii) a lipid nanoparticle; iii) a virus-like particle; iv) a liposome; or v) a lipid nanocrystal. In some embodiments, the pharmaceutical composition comprises an sgRNA having a crRNA sequence selected from SEQ ID NOs: 637-655 and a S. pyogenes Cas9 protein encapsulated in a lipid nanoparticle.

[0551] In various embodiments, the pharmaceutical composition comprising a CRISPR gene-editing system targeting the CXCR1 gene is used in a method of treating a mammal in need thereof. In some embodiments, the method treats a discogenic disease or disorder. In some embodiments, the discogenic disease or disorder is low back pain, neck pain, lumbar pain, degenerative disc disease, discogenic pain annual ligament tear, herniated disc, spinal facet joint arthritis, intervertebral disc disease, spondylosis, painful scoliosis, or spinal stenosis. In some embodiments, the discogenic disease or disorder is discogenic pain.

[0552] In some embodiments, a method is provided for treating a discogenic disease or disorder by administering a therapeutically affective amount of a pharmaceutical composition comprising a CRISPR gene-editing system targeting the CXCR1 gene, as described herein, to a subject in need thereof. In some embodiments, the pharmaceutical composition comprises an LNP encapsuling an sgRNA having a crRNA sequence selected from SEQ ID NOs: 637-655 and a S. pyogenes Cas9 protein. In some embodiments, the crRNA sequence is selected from SEQ ID NOs: 637-646. In some embodiments, the pharmaceutical composition is administered by intradiscal injection.

[0553] In some embodiments, a method is provided for treating a musculoskeletal disease or disorder by administering a therapeutically affective amount of a pharmaceutical composition comprising a CRISPR gene-editing system targeting the CXCR1 gene, as described herein, to a subject in need thereof. In some embodiments, the musculoskeletal disease or disorder is Arthritis, Infectious Intermittent joint effusion, Ankylosing spondylitis, Arthritis, Osteoarthritis, Spondylarthritis, Plantar fasciitis, Degenerative polyarthritis, Hemophilic arthropathy, Inflammatory myopathy with abundant macrophages, or Polymyositis.

[0554] In yet other embodiments, a method is provided for treating an inflammatory disease or disorder by administering a therapeutically affective amount of a pharmaceutical composition comprising a CRISPR gene-editing system targeting the CXCR1 gene, as described herein, to a subject in need thereof. In some embodiments, the inflammatory disease or disorder is Autoinflammatory Disease (AID), Cryopyrin Associated Periodic syndrome (CAPS), Familial Mediterranean Fever (FMF), TNF-Receptor Associated Periodic Syndrome (TRAPS), Hyper-IgD Syndrome (HIDS), Systemic Lupus Erythematosus (SLE), or Fibrosis (general).

[0555] In certain embodiments, any region of an CXCR1 gene (e.g., 5′ untranslated region [UTR], exon 1, exon 2, any intervening intronic regions, intron/exon junctions, the 3′ UTR, or polyadenylation signal) is targeted by an RNA-guided nuclease to alter the gene. In some embodiments, the CXCR1 gene targeted by an RNA-guided nuclease is from a mammal. In some embodiments, the CXCR1 gene targeted by an RNA-guided nuclease is from a human (hCXCR1). In some embodiments, the CXCR1 gene targeted by an RNA-guided nuclease is from a dog (cCXCR1). In some embodiments, the CXCR1 gene targeted by an RNA-guided nuclease is from a horse (eCXCR1). In some embodiments, the CXCR1 gene targeted by an RNA-guided nuclease is from a cat (fCXCR1).

### BB. CXCR2

[0556] In one aspect, methods and pharmaceutical compositions are provided for treating a back or spine condition or disorder by administering a therapeutically effective amount of a CRISPR pharmaceutical composition that targets an CXCR2 gene to a subject in need thereof. In some embodiments, the CRISPR pharmaceutical composition comprises an RNA-guided nuclease and an sgRNA targeting the CXCR2 gene with a crRNA sequence selected from SEQ ID NOs: 656-672. In some embodiments, the crRNA sequence is selected from 656-665. In some embodiments, the RNA-guided nuclease is a Cas9 protein. In some embodiments, the Cas9 protein is an S. pyogenes Cas9 protein. In some embodiments, the S. pyogenes Cas9 protein comprises K848A, K1003A, and R1060A amino acid substitutions relative to the SpCas9 sequence of NCBI accession number 7S37_P. In some embodiments, the S. pyogenes Cas9 protein comprises an R691A amino acid substitution relative to the SpCas9 sequence of NCBI accession number 7S37_P.

[0557] In some embodiments, the CRISPR gene-editing system targeting the CXCR2 gene is delivered to a mammalian cell via viral vector. In some embodiments, the CRISPR gene-editing system targeting the CXCR2 gene is delivered to a mammalian cell via an AAV vector. In some embodiments, the CRISPR gene-editing system targeting the CXCR2 gene is delivered to a mammalian cell via a lentiviral vector. In some embodiments, the CRISPR gene-editing system targeting the CXCR2 gene is delivered to a mammalian cell via a lipid nanoparticle. In some embodiments, the CRISPR gene-editing system targeting the CXCR2 gene is delivered to a mammalian cell via a virus-like particle. In some embodiments, the CRISPR gene-editing system targeting the CXCR2 gene is delivered to a mammalian cell via a liposome. In some embodiments, the CRISPR gene-editing system targeting the CXCR2 gene is delivered to a mammalian cell via a lipid nanocrystal.

[0558] In some embodiments, the pharmaceutical composition comprises an sgRNA having a crRNA sequence selected from SEQ ID NOs: 656-672 and a S. pyogenes Cas9 protein, optionally comprising K848A, K1003A, and R1060A amino acid substitutions or an R691A amino acid substitution, encapsulated in i) a viral vector selected from an AAV vector and a lentiviral vector; ii) a lipid nanoparticle; iii) a virus-like particle; iv) a liposome; or v) a lipid nanocrystal. In some embodiments, the pharmaceutical composition comprises an sgRNA having a crRNA sequence selected from SEQ ID NOs: 656-672 and a S. pyogenes Cas9 protein encapsulated in a lipid nanoparticle.

[0559] In various embodiments, the pharmaceutical composition comprising a CRISPR gene-editing system targeting the CXCR2 gene is used in a method of treating a mammal in need thereof. In some embodiments, the method treats a discogenic disease or disorder. In some embodiments, the discogenic disease or disorder is low back pain, neck pain, lumbar pain, degenerative disc disease, discogenic pain annual ligament tear, herniated disc, spinal facet joint arthritis, intervertebral disc disease, spondylosis, painful scoliosis, or spinal stenosis. In some embodiments, the discogenic disease or disorder is discogenic pain.

[0560] In some embodiments, a method is provided for treating a discogenic disease or disorder by administering a therapeutically affective amount of a pharmaceutical composition comprising a CRISPR gene-editing system targeting the CXCR2 gene, as described herein, to a subject in need thereof. In some embodiments, the pharmaceutical composition comprises an LNP encapsuling an sgRNA having a crRNA sequence selected from SEQ ID NOs: 656-672 and a S. pyogenes Cas9 protein. In some embodiments, the crRNA sequence is selected from SEQ ID NOs: 656-665. In some embodiments, the pharmaceutical composition is administered by intradiscal injection.

[0561] In some embodiments, a method is provided for treating a musculoskeletal disease or disorder by administering a therapeutically affective amount of a pharmaceutical composition comprising a CRISPR gene-editing system targeting the CXCR2 gene, as described herein, to a subject in need thereof. In some embodiments, the musculoskeletal disease or disorder is Arthritis, Infectious Intermittent joint effusion, Ankylosing spondylitis, Arthritis, Osteoarthritis, Spondylarthritis, Plantar fasciitis, Degenerative polyarthritis, Hemophilic arthropathy, Inflammatory myopathy with abundant macrophages, or Polymyositis.

[0562] In yet other embodiments, a method is provided for treating an inflammatory disease or disorder by administering a therapeutically affective amount of a pharmaceutical composition comprising a CRISPR gene-editing system targeting the CXCR2 gene, as described herein, to a subject in need thereof. In some embodiments, the inflammatory disease or disorder is Autoinflammatory Disease (AID), Cryopyrin Associated Periodic syndrome (CAPS), Familial Mediterranean Fever (FMF), TNF-Receptor Associated Periodic Syndrome (TRAPS), Hyper-IgD Syndrome (HIDS), Systemic Lupus Erythematosus (SLE), or Fibrosis (general).

[0563] In certain embodiments, any region of an CXCR2 gene (e.g., 5′ untranslated region [UTR], exon 1, exon 2, exon 3, exon 4, exon 5, exon 6, any intervening intronic regions, intron/exon junctions, the 3′ UTR, or polyadenylation signal) is targeted by an RNA-guided nuclease to alter the gene. In some embodiments, the CXCR2 gene targeted by an RNA-guided nuclease is from a mammal. In some embodiments, the CXCR2 gene targeted by an RNA-guided nuclease is from a human (hCXCR2). In some embodiments, the CXCR2 gene targeted by an RNA-guided nuclease is from a dog (cCXCR2). In some embodiments, the CXCR2 gene targeted by an RNA-guided nuclease is from a horse (eCXCR2). In some embodiments, the CXCR2 gene targeted by an RNA-guided nuclease is from a cat (fCXCR2).

### CC. CCR7

[0564] In one aspect, methods and pharmaceutical compositions are provided for treating a back or spine condition or disorder by administering a therapeutically effective amount of a CRISPR pharmaceutical composition that targets an CCR7 gene to a subject in need thereof. In some embodiments, the CRISPR pharmaceutical composition comprises an RNA-guided nuclease and an sgRNA targeting the CCR7 gene with a crRNA sequence selected from SEQ ID NOs: 474-517. In some embodiments, the crRNA sequence is selected from SEQ ID NOs: 474-498. In some embodiments, the crRNA sequence is selected from 474-483. In some embodiments, the RNA-guided nuclease is a Cas9 protein. In some embodiments, the Cas9 protein is an S. pyogenes Cas9 protein. In some embodiments, the S. pyogenes Cas9 protein comprises K848A, K1003A, and R1060A amino acid substitutions relative to the SpCas9 sequence of NCBI accession number 7S37_P. In some embodiments, the S. pyogenes Cas9 protein comprises an R691A amino acid substitution relative to the SpCas9 sequence of NCBI accession number 7S37_P.

[0565] In some embodiments, the CRISPR gene-editing system targeting the CCR7 gene is delivered to a mammalian cell via viral vector. In some embodiments, the CRISPR gene-editing system targeting the CCR7 gene is delivered to a mammalian cell via an AAV vector. In some embodiments, the CRISPR gene-editing system targeting the CCR7 gene is delivered to a mammalian cell via a lentiviral vector. In some embodiments, the CRISPR gene-editing system targeting the CCR7 gene is delivered to a mammalian cell via a lipid nanoparticle. In some embodiments, the CRISPR gene-editing system targeting the CCR7 gene is delivered to a mammalian cell via a virus-like particle. In some embodiments, the CRISPR gene-editing system targeting the CCR7 gene is delivered to a mammalian cell via a liposome. In some embodiments, the CRISPR gene-editing system targeting the CCR7 gene is delivered to a mammalian cell via a lipid nanocrystal.

[0566] In some embodiments, the pharmaceutical composition comprises an sgRNA having a crRNA sequence selected from SEQ ID NOs: 474-517 and a S. pyogenes Cas9 protein, optionally comprising K848A, K1003A, and R1060A amino acid substitutions or an R691A amino acid substitution, encapsulated in i) a viral vector selected from an AAV vector and a lentiviral vector; ii) a lipid nanoparticle; iii) a virus-like particle; iv) a liposome; or v) a lipid nanocrystal. In some embodiments, the pharmaceutical composition comprises an sgRNA having a crRNA sequence selected from SEQ ID NOs: 474-517 and a S. pyogenes Cas9 protein encapsulated in a lipid nanoparticle.

[0567] In various embodiments, the pharmaceutical composition comprising a CRISPR gene-editing system targeting the CCR7 gene is used in a method of treating a mammal in need thereof. In some embodiments, the method treats a discogenic disease or disorder. In some embodiments, the discogenic disease or disorder is low back pain, neck pain, lumbar pain, degenerative disc disease, discogenic pain annual ligament tear, herniated disc, spinal facet joint arthritis, intervertebral disc disease, spondylosis, painful scoliosis, or spinal stenosis. In some embodiments, the discogenic disease or disorder is discogenic pain.

[0568] In some embodiments, a method is provided for treating a discogenic disease or disorder by administering a therapeutically affective amount of a pharmaceutical composition comprising a CRISPR gene-editing system targeting the CCR7 gene, as described herein, to a subject in need thereof. In some embodiments, the pharmaceutical composition comprises an LNP encapsuling an sgRNA having a crRNA sequence selected from SEQ ID NOs: 474-517 and a S. pyogenes Cas9 protein. In some embodiments, the crRNA sequence is selected from SEQ ID NOs: 474-498. In some embodiments, the crRNA sequence is selected from SEQ ID NOs: 474-483. In some embodiments, the pharmaceutical composition is administered by intradiscal injection.

[0569] In some embodiments, a method is provided for treating a musculoskeletal disease or disorder by administering a therapeutically affective amount of a pharmaceutical composition comprising a CRISPR gene-editing system targeting the CCR7 gene, as described herein, to a subject in need thereof. In some embodiments, the musculoskeletal disease or disorder is Arthritis, Infectious Intermittent joint effusion, Ankylosing spondylitis, Arthritis, Osteoarthritis, Spondylarthritis, Plantar fasciitis, Degenerative polyarthritis, Hemophilic arthropathy, Inflammatory myopathy with abundant macrophages, or Polymyositis.

[0570] In yet other embodiments, a method is provided for treating an inflammatory disease or disorder by administering a therapeutically affective amount of a pharmaceutical composition comprising a CRISPR gene-editing system targeting the CCR7 gene, as described herein, to a subject in need thereof. In some embodiments, the inflammatory disease or disorder is Autoinflammatory Disease (AID), Cryopyrin Associated Periodic syndrome (CAPS), Familial Mediterranean Fever (FMF), TNF-Receptor Associated Periodic Syndrome (TRAPS), Hyper-IgD Syndrome (HIDS), Systemic Lupus Erythematosus (SLE), or Fibrosis (general).

[0571] In certain embodiments, any region of an CCR7 gene (e.g., 5′ untranslated region [UTR], exon 1, exon 2, exon 3, exon 4, exon 5, any intervening intronic regions, intron/exon junctions, the 3′ UTR, or polyadenylation signal) is targeted by an RNA-guided nuclease to alter the gene. In some embodiments, the CCR7 gene targeted by an RNA-guided nuclease is from a mammal. In some embodiments, the CCR7 gene targeted by an RNA-guided nuclease is from a human (hCCR7). In some embodiments, the CCR7 gene targeted by an RNA-guided nuclease is from a dog (cCCR7). In some embodiments, the CCR7 gene targeted by an RNA-guided nuclease is from a horse (eCCR7). In some embodiments, the CCR7 gene targeted by an RNA-guided nuclease is from a cat (fCCR7).

### DD. ADAM17

[0572] In one aspect, methods and pharmaceutical compositions are provided for treating a back or spine condition or disorder by administering a therapeutically effective amount of a CRISPR pharmaceutical composition that targets an ADAM17 gene to a subject in need thereof. In some embodiments, the CRISPR pharmaceutical composition comprises an RNA-guided nuclease and an sgRNA targeting the ADAM17 gene with a crRNA sequence selected from SEQ ID NOs: 1-48. In some embodiments, the crRNA sequence is selected from SEQ ID NOs: 1-25. In some embodiments, the crRNA sequence is selected from 1-10. In some embodiments, the RNA-guided nuclease is a Cas9 protein. In some embodiments, the Cas9 protein is an S. pyogenes Cas9 protein. In some embodiments, the S. pyogenes Cas9 protein comprises K848A, K1003A, and R1060A amino acid substitutions relative to the SpCas9 sequence of NCBI accession number 7S37_P. In some embodiments, the S. pyogenes Cas9 protein comprises an R691A amino acid substitution relative to the SpCas9 sequence of NCBI accession number 7S37_P.

[0573] In some embodiments, the CRISPR gene-editing system targeting the ADAM17 gene is delivered to a mammalian cell via viral vector. In some embodiments, the CRISPR gene-editing system targeting the ADAM17 gene is delivered to a mammalian cell via an AAV vector. In some embodiments, the CRISPR gene-editing system targeting the ADAM17 gene is delivered to a mammalian cell via a lentiviral vector. In some embodiments, the CRISPR gene-editing system targeting the ADAM17 gene is delivered to a mammalian cell via a lipid nanoparticle. In some embodiments, the CRISPR gene-editing system targeting the ADAM17 gene is delivered to a mammalian cell via a virus-like particle. In some embodiments, the CRISPR gene-editing system targeting the ADAM17 gene is delivered to a mammalian cell via a liposome. In some embodiments, the CRISPR gene-editing system targeting the ADAM17 gene is delivered to a mammalian cell via a lipid nanocrystal.

[0574] In some embodiments, the pharmaceutical composition comprises an sgRNA having a crRNA sequence selected from SEQ ID NOs: 1-48 and a S. pyogenes Cas9 protein, optionally comprising K848A, K1003A, and R1060A amino acid substitutions or an R691A amino acid substitution, encapsulated in i) a viral vector selected from an AAV vector and a lentiviral vector; ii) a lipid nanoparticle; iii) a virus-like particle; iv) a liposome; or v) a lipid nanocrystal. In some embodiments, the pharmaceutical composition comprises an sgRNA having a crRNA sequence selected from SEQ ID NOs: 1-48 and a S. pyogenes Cas9 protein encapsulated in a lipid nanoparticle.

[0575] In various embodiments, the pharmaceutical composition comprising a CRISPR gene-editing system targeting the ADAM17 gene is used in a method of treating a mammal in need thereof. In some embodiments, the method treats a discogenic disease or disorder. In some embodiments, the discogenic disease or disorder is low back pain, neck pain, lumbar pain, degenerative disc disease, discogenic pain annual ligament tear, herniated disc, spinal facet joint arthritis, intervertebral disc disease, spondylosis, painful scoliosis, or spinal stenosis. In some embodiments, the discogenic disease or disorder is discogenic pain.

[0576] In some embodiments, a method is provided for treating a discogenic disease or disorder by administering a therapeutically affective amount of a pharmaceutical composition comprising a CRISPR gene-editing system targeting the ADAM17 gene, as described herein, to a subject in need thereof. In some embodiments, the pharmaceutical composition comprises an LNP encapsuling an sgRNA having a crRNA sequence selected from SEQ ID NOs: 1-48 and a S. pyogenes Cas9 protein. In some embodiments, the crRNA sequence is selected from SEQ ID NOs: 1-25. In some embodiments, the crRNA sequence is selected from SEQ ID NOs: 1-10. In some embodiments, the pharmaceutical composition is administered by intradiscal injection.

[0577] In some embodiments, a method is provided for treating a musculoskeletal disease or disorder by administering a therapeutically affective amount of a pharmaceutical composition comprising a CRISPR gene-editing system targeting the ADAM17 gene, as described herein, to a subject in need thereof. In some embodiments, the musculoskeletal disease or disorder is Arthritis, Infectious Intermittent joint effusion, Ankylosing spondylitis, Arthritis, Osteoarthritis, Spondylarthritis, Plantar fasciitis, Degenerative polyarthritis, Hemophilic arthropathy, Inflammatory myopathy with abundant macrophages, or Polymyositis.

[0578] In yet other embodiments, a method is provided for treating an inflammatory disease or disorder by administering a therapeutically affective amount of a pharmaceutical composition comprising a CRISPR gene-editing system targeting the ADAM17 gene, as described herein, to a subject in need thereof. In some embodiments, the inflammatory disease or disorder is Autoinflammatory Disease (AID), Cryopyrin Associated Periodic syndrome (CAPS), Familial Mediterranean Fever (FMF), TNF-Receptor Associated Periodic Syndrome (TRAPS), Hyper-IgD Syndrome (HIDS), Systemic Lupus Erythematosus (SLE), or Fibrosis (general).

[0579] In certain embodiments, any region of an ADAM17 gene (e.g., 5′ untranslated region [UTR], exon 1, exon 2, exon 3, exon 4, exon 5, exon 6, exon 7, exon 8, exon 9, exon 10, exon 11, exon 12, exon 13, exon 14, exon 15, exon 16, exon 17, exon 18, exon 19, exon 20, exon 21, any intervening intronic regions, intron/exon junctions, the 3′ UTR, or polyadenylation signal) is targeted by an RNA-guided nuclease to alter the gene. In some embodiments, the ADAM17 gene targeted by an RNA-guided nuclease is from a mammal. In some embodiments, the ADAM17 gene targeted by an RNA-guided nuclease is from a human (hADAM17). In some embodiments, the ADAM17 gene targeted by an RNA-guided nuclease is from a dog (cADAM17). In some embodiments, the ADAM17 gene targeted by an RNA-guided nuclease is from a horse (eADAM17). In some embodiments, the ADAM17 gene targeted by an RNA-guided nuclease is from a cat (fADAM17).

### EE. TNF

[0580] In one aspect, methods and pharmaceutical compositions are provided for treating a back or spine condition or disorder by administering a therapeutically effective amount of a CRISPR pharmaceutical composition that targets an TNF gene to a subject in need thereof. In some embodiments, the CRISPR pharmaceutical composition comprises an RNA-guided nuclease and an sgRNA targeting the TNF gene with a crRNA sequence selected from SEQ ID NOs: 2558-2574. In some embodiments, the crRNA sequence is selected from 2558-2567. In some embodiments, the RNA-guided nuclease is a Cas9 protein. In some embodiments, the Cas9 protein is an S. pyogenes Cas9 protein. In some embodiments, the S. pyogenes Cas9 protein comprises K848A, K1003A, and R1060A amino acid substitutions relative to the SpCas9 sequence of NCBI accession number 7537_P. In some embodiments, the S. pyogenes Cas9 protein comprises an R691A amino acid substitution relative to the SpCas9 sequence of NCBI accession number 7S37_P.

[0581] In some embodiments, the CRISPR gene-editing system targeting the TNF gene is delivered to a mammalian cell via viral vector. In some embodiments, the CRISPR gene-editing system targeting the TNF gene is delivered to a mammalian cell via an AAV vector. In some embodiments, the CRISPR gene-editing system targeting the TNF gene is delivered to a mammalian cell via a lentiviral vector. In some embodiments, the CRISPR gene-editing system targeting the TNF gene is delivered to a mammalian cell via a lipid nanoparticle. In some embodiments, the CRISPR gene-editing system targeting the TNF gene is delivered to a mammalian cell via a virus-like particle. In some embodiments, the CRISPR gene-editing system targeting the TNF gene is delivered to a mammalian cell via a liposome. In some embodiments, the CRISPR gene-editing system targeting the TNF gene is delivered to a mammalian cell via a lipid nanocrystal.

[0582] In some embodiments, the pharmaceutical composition comprises an sgRNA having a crRNA sequence selected from SEQ ID NOs: 2558-2574 and a S. pyogenes Cas9 protein, optionally comprising K848A, K1003A, and R1060A amino acid substitutions or an R691A amino acid substitution, encapsulated in i) a viral vector selected from an AAV vector and a lentiviral vector; ii) a lipid nanoparticle; iii) a virus-like particle; iv) a liposome; or v) a lipid nanocrystal. In some embodiments, the pharmaceutical composition comprises an sgRNA having a crRNA sequence selected from SEQ ID NOs: 2558-2574 and a S. pyogenes Cas9 protein encapsulated in a lipid nanoparticle.

[0583] In various embodiments, the pharmaceutical composition comprising a CRISPR gene-editing system targeting the TNF gene is used in a method of treating a mammal in need thereof. In some embodiments, the method treats a discogenic disease or disorder. In some embodiments, the discogenic disease or disorder is low back pain, neck pain, lumbar pain, degenerative disc disease, discogenic pain annual ligament tear, herniated disc, spinal facet joint arthritis, intervertebral disc disease, spondylosis, painful scoliosis, or spinal stenosis. In some embodiments, the discogenic disease or disorder is discogenic pain.

[0584] In some embodiments, a method is provided for treating a discogenic disease or disorder by administering a therapeutically affective amount of a pharmaceutical composition comprising a CRISPR gene-editing system targeting the TNF gene, as described herein, to a subject in need thereof. In some embodiments, the pharmaceutical composition comprises an LNP encapsuling an sgRNA having a crRNA sequence selected from SEQ ID NOs: 2558-2574 and a S. pyogenes Cas9 protein. In some embodiments, the crRNA sequence is selected from SEQ ID NOs: 2558-2567. In some embodiments, the pharmaceutical composition is administered by intradiscal injection.

[0585] In some embodiments, a method is provided for treating a musculoskeletal disease or disorder by administering a therapeutically affective amount of a pharmaceutical composition comprising a CRISPR gene-editing system targeting the TNF gene, as described herein, to a subject in need thereof. In some embodiments, the musculoskeletal disease or disorder is Arthritis, Infectious Intermittent joint effusion, Ankylosing spondylitis, Arthritis, Osteoarthritis, Spondylarthritis, Plantar fasciitis, Degenerative polyarthritis, Hemophilic arthropathy, Inflammatory myopathy with abundant macrophages, or Polymyositis.

[0586] In yet other embodiments, a method is provided for treating an inflammatory disease or disorder by administering a therapeutically affective amount of a pharmaceutical composition comprising a CRISPR gene-editing system targeting the TNF gene, as described herein, to a subject in need thereof. In some embodiments, the inflammatory disease or disorder is Autoinflammatory Disease (AID), Cryopyrin Associated Periodic syndrome (CAPS), Familial Mediterranean Fever (FMF), TNF-Receptor Associated Periodic Syndrome (TRAPS), Hyper-IgD Syndrome (HIDS), Systemic Lupus Erythematosus (SLE), or Fibrosis (general).

[0587] In certain embodiments, any region of an TNF gene (e.g., 5′ untranslated region [UTR], exon 1, exon 2, exon 3, exon 4, any intervening intronic regions, intron/exon junctions, the 3′ UTR, or polyadenylation signal) is targeted by an RNA-guided nuclease to alter the gene. In some embodiments, the TNF gene targeted by an RNA-guided nuclease is from a mammal. In some embodiments, the TNF gene targeted by an RNA-guided nuclease is from a human (hTNF). In some embodiments, the TNF gene targeted by an RNA-guided nuclease is from a dog (cTNF). In some embodiments, the TNF gene targeted by an RNA-guided nuclease is from a horse (eTNF). In some embodiments, the TNF gene targeted by an RNA-guided nuclease is from a cat (fFNF).

### FF. TNFRSF1A

[0588] In one aspect, methods and pharmaceutical compositions are provided for treating a back or spine condition or disorder by administering a therapeutically effective amount of a CRISPR pharmaceutical composition that targets an TNFRSF1A gene to a subject in need thereof. In some embodiments, the CRISPR pharmaceutical composition comprises an RNA-guided nuclease and an sgRNA targeting the TNFRSF1A gene with a crRNA sequence selected from SEQ ID NOs: 2575-2622. In some embodiments, the crRNA sequence is selected from SEQ ID NOs: 2575-2599. In some embodiments, the crRNA sequence is selected from 2575-2584. In some embodiments, the RNA-guided nuclease is a Cas9 protein. In some embodiments, the Cas9 protein is an S. pyogenes Cas9 protein. In some embodiments, the S. pyogenes Cas9 protein comprises K848A, K1003A, and R1060A amino acid substitutions relative to the SpCas9 sequence of NCBI accession number 7S37_P. In some embodiments, the S. pyogenes Cas9 protein comprises an R691A amino acid substitution relative to the SpCas9 sequence of NCBI accession number 7S37_P.

[0589] In some embodiments, the CRISPR gene-editing system targeting the TNFRSF1A gene is delivered to a mammalian cell via viral vector. In some embodiments, the CRISPR gene-editing system targeting the TNFRSF1A gene is delivered to a mammalian cell via an AAV vector. In some embodiments, the CRISPR gene-editing system targeting the TNFRSF1A gene is delivered to a mammalian cell via a lentiviral vector. In some embodiments, the CRISPR gene-editing system targeting the TNFRSF1A gene is delivered to a mammalian cell via a lipid nanoparticle. In some embodiments, the CRISPR gene-editing system targeting the TNFRSF1A gene is delivered to a mammalian cell via a virus-like particle. In some embodiments, the CRISPR gene-editing system targeting the TNFRSF1A gene is delivered to a mammalian cell via a liposome. In some embodiments, the CRISPR gene-editing system targeting the TNFRSF1A gene is delivered to a mammalian cell via a lipid nanocrystal.

[0590] In some embodiments, the pharmaceutical composition comprises an sgRNA having a crRNA sequence selected from SEQ ID NOs: 2575-2622 and a S. pyogenes Cas9 protein, optionally comprising K848A, K1003A, and R1060A amino acid substitutions or an R691A amino acid substitution, encapsulated in i) a viral vector selected from an AAV vector and a lentiviral vector; ii) a lipid nanoparticle; iii) a virus-like particle; iv) a liposome; or v) a lipid nanocrystal. In some embodiments, the pharmaceutical composition comprises an sgRNA having a crRNA sequence selected from SEQ ID NOs: 2575-2622 and a S. pyogenes Cas9 protein encapsulated in a lipid nanoparticle.

[0591] In various embodiments, the pharmaceutical composition comprising a CRISPR gene-editing system targeting the TNFRSF1A gene is used in a method of treating a mammal in need thereof. In some embodiments, the method treats a discogenic disease or disorder. In some embodiments, the discogenic disease or disorder is low back pain, neck pain, lumbar pain, degenerative disc disease, discogenic pain annual ligament tear, herniated disc, spinal facet joint arthritis, intervertebral disc disease, spondylosis, painful scoliosis, or spinal stenosis. In some embodiments, the discogenic disease or disorder is discogenic pain.

[0592] In some embodiments, a method is provided for treating a discogenic disease or disorder by administering a therapeutically affective amount of a pharmaceutical composition comprising a CRISPR gene-editing system targeting the TNFRSF1A gene, as described herein, to a subject in need thereof. In some embodiments, the pharmaceutical composition comprises an LNP encapsuling an sgRNA having a crRNA sequence selected from SEQ ID NOs: 2575-2622 and a S. pyogenes Cas9 protein. In some embodiments, the crRNA sequence is selected from SEQ ID NOs: 2575-2599. In some embodiments, the crRNA sequence is selected from SEQ ID NOs: 2575-2584. In some embodiments, the pharmaceutical composition is administered by intradiscal injection.

[0593] In some embodiments, a method is provided for treating a musculoskeletal disease or disorder by administering a therapeutically affective amount of a pharmaceutical composition comprising a CRISPR gene-editing system targeting the TNFRSF1A gene, as described herein, to a subject in need thereof. In some embodiments, the musculoskeletal disease or disorder is Arthritis, Infectious Intermittent joint effusion, Ankylosing spondylitis, Arthritis, Osteoarthritis, Spondylarthritis, Plantar fasciitis, Degenerative polyarthritis, Hemophilic arthropathy, Inflammatory myopathy with abundant macrophages, or Polymyositis.

[0594] In yet other embodiments, a method is provided for treating an inflammatory disease or disorder by administering a therapeutically affective amount of a pharmaceutical composition comprising a CRISPR gene-editing system targeting the TNFRSF1A gene, as described herein, to a subject in need thereof. In some embodiments, the inflammatory disease or disorder is Autoinflammatory Disease (AID), Cryopyrin Associated Periodic syndrome (CAPS), Familial Mediterranean Fever (FMF), TNF-Receptor Associated Periodic Syndrome (TRAPS), Hyper-IgD Syndrome (HIDS), Systemic Lupus Erythematosus (SLE), or Fibrosis (general).

[0595] In certain embodiments, any region of an TNFRSF1A gene (e.g., 5′ untranslated region [UTR], exon 1, exon 2, exon 3, exon 4, exon 5, exon 6, exon 7, exon 8, exon 9, exon 10, exon 11, any intervening intronic regions, intron/exon junctions, the 3′ UTR, or polyadenylation signal) is targeted by an RNA-guided nuclease to alter the gene. In some embodiments, the TNFRSF1A gene targeted by an RNA-guided nuclease is from a mammal. In some embodiments, the TNFRSF1A gene targeted by an RNA-guided nuclease is from a human (hTNFRSF1A). In some embodiments, the TNFRSF1A gene targeted by an RNA-guided nuclease is from a dog (cTNFRSF1A). In some embodiments, the TNFRSF1A gene targeted by an RNA-guided nuclease is from a horse (eTNFRSF1A). In some embodiments, the TNFRSF1A gene targeted by an RNA-guided nuclease is from a cat (fTNFRSF1A).

### GG. TNFRSF1B

[0596] In one aspect, methods and pharmaceutical compositions are provided for treating a back or spine condition or disorder by administering a therapeutically effective amount of a CRISPR pharmaceutical composition that targets an TNFRSF1B gene to a subject in need thereof. In some embodiments, the CRISPR pharmaceutical composition comprises an RNA-guided nuclease and an sgRNA targeting the TNFRSF1B gene with a crRNA sequence selected from SEQ ID NOs: 2623-2670. In some embodiments, the crRNA sequence is selected from SEQ ID NOs: 2623-2647. In some embodiments, the crRNA sequence is selected from 2623-2632. In some embodiments, the RNA-guided nuclease is a Cas9 protein. In some embodiments, the Cas9 protein is an S. pyogenes Cas9 protein. In some embodiments, the S. pyogenes Cas9 protein comprises K848A, K1003A, and R1060A amino acid substitutions relative to the SpCas9 sequence of NCBI accession number 7S37_P. In some embodiments, the S. pyogenes Cas9 protein comprises an R691A amino acid substitution relative to the SpCas9 sequence of NCBI accession number 7S37_P.

[0597] In some embodiments, the CRISPR gene-editing system targeting the TNFRSF1B gene is delivered to a mammalian cell via viral vector. In some embodiments, the CRISPR gene-editing system targeting the TNFRSF1B gene is delivered to a mammalian cell via an AAV vector. In some embodiments, the CRISPR gene-editing system targeting the TNFRSF1B gene is delivered to a mammalian cell via a lentiviral vector. In some embodiments, the CRISPR gene-editing system targeting the TNFRSF1B gene is delivered to a mammalian cell via a lipid nanoparticle. In some embodiments, the CRISPR gene-editing system targeting the TNFRSF1B gene is delivered to a mammalian cell via a virus-like particle. In some embodiments, the CRISPR gene-editing system targeting the TNFRSF1B gene is delivered to a mammalian cell via a liposome. In some embodiments, the CRISPR gene-editing system targeting the TNFRSF1B gene is delivered to a mammalian cell via a lipid nanocrystal.

[0598] In some embodiments, the pharmaceutical composition comprises an sgRNA having a crRNA sequence selected from SEQ ID NOs: 2623-2670 and a S. pyogenes Cas9 protein, optionally comprising K848A, K1003A, and R1060A amino acid substitutions or an R691A amino acid substitution, encapsulated in i) a viral vector selected from an AAV vector and a lentiviral vector; ii) a lipid nanoparticle; iii) a virus-like particle; iv) a liposome; or v) a lipid nanocrystal. In some embodiments, the pharmaceutical composition comprises an sgRNA having a crRNA sequence selected from SEQ ID NOs: 2623-2670 and a S. pyogenes Cas9 protein encapsulated in a lipid nanoparticle.

[0599] In various embodiments, the pharmaceutical composition comprising a CRISPR gene-editing system targeting the TNFRSF1B gene is used in a method of treating a mammal in need thereof. In some embodiments, the method treats a discogenic disease or disorder. In some embodiments, the discogenic disease or disorder is low back pain, neck pain, lumbar pain, degenerative disc disease, discogenic pain annual ligament tear, herniated disc, spinal facet joint arthritis, intervertebral disc disease, spondylosis, painful scoliosis, or spinal stenosis. In some embodiments, the discogenic disease or disorder is discogenic pain.

[0600] In some embodiments, a method is provided for treating a discogenic disease or disorder by administering a therapeutically affective amount of a pharmaceutical composition comprising a CRISPR gene-editing system targeting the TNFRSF1B gene, as described herein, to a subject in need thereof. In some embodiments, the pharmaceutical composition comprises an LNP encapsuling an sgRNA having a crRNA sequence selected from SEQ ID NOs: 2623-2670 and a S. pyogenes Cas9 protein. In some embodiments, the crRNA sequence is selected from SEQ ID NOs: 2623-2647. In some embodiments, the crRNA sequence is selected from SEQ ID NOs: 2623-2632. In some embodiments, the pharmaceutical composition is administered by intradiscal injection.

[0601] In some embodiments, a method is provided for treating a musculoskeletal disease or disorder by administering a therapeutically affective amount of a pharmaceutical composition comprising a CRISPR gene-editing system targeting the TNFRSF1B gene, as described herein, to a subject in need thereof. In some embodiments, the musculoskeletal disease or disorder is Arthritis. Infectious Intermittent joint effusion, Ankylosing spondylitis, Arthritis, Osteoarthritis, Spondylarthritis, Plantar fasciitis, Degenerative polyarthritis, Hemophilic arthropathy, Inflammatory myopathy with abundant macrophages, or Polymyositis.

[0602] In yet other embodiments, a method is provided for treating an inflammatory disease or disorder by administering a therapeutically affective amount of a pharmaceutical composition comprising a CRISPR gene-editing system targeting the TNFRSF1B gene, as described herein, to a subject in need thereof. In some embodiments, the inflammatory disease or disorder is Autoinflammatory Disease (AID), Cryopyrin Associated Periodic syndrome (CAPS), Familial Mediterranean Fever (FMF), TNF-Receptor Associated Periodic Syndrome (TRAPS), Hyper-IgD Syndrome (HIDS), Systemic Lupus Erythematosus (SLE), or Fibrosis (general).

[0603] In certain embodiments, any region of an TNFRSF1B gene (e.g., 5′ untranslated region [UTR], exon 1, exon 2, exon 3, exon 4, exon 5, exon 6, exon 7, exon 8, exon 9, exon 10, exon 11, exon 12, exon 13, any intervening intronic regions, intron/exon junctions, the 3′ UTR, or polyadenylation signal) is targeted by an RNA-guided nuclease to alter the gene. In some embodiments, the TNFRSF1B gene targeted by an RNA-guided nuclease is from a mammal. In some embodiments, the TNFRSF1B gene targeted by an RNA-guided nuclease is from a human (hTNFRSF1B). In some embodiments, the TNFRSF1B gene targeted by an RNA-guided nuclease is from a dog (cTNFRSF1B). In some embodiments, the TNFRSF1B gene targeted by an RNA-guided nuclease is from a horse (eTNFRSF1B). In some embodiments, the TNFRSF1B gene targeted by an RNA-guided nuclease is from a cat (fTNFRSF1B).

### HH. IL4

[0604] In one aspect, methods and pharmaceutical compositions are provided for treating a back or spine condition or disorder by administering a therapeutically effective amount of a CRISPR pharmaceutical composition that targets an IL4 gene to a subject in need thereof. In some embodiments, the CRISPR pharmaceutical composition comprises an RNA-guided nuclease and an sgRNA targeting the IL4 gene with a crRNA sequence selected from SEQ ID NOs: 888-911. In some embodiments, the crRNA sequence is selected from 888-897. In some embodiments, the RNA-guided nuclease is a Cas9 protein. In some embodiments, the Cas9 protein is an S. pyogenes Cas9 protein. In some embodiments, the S. pyogenes Cas9 protein comprises K848A, K1003A, and R1060A amino acid substitutions relative to the SpCas9 sequence of NCBI accession number 7S37_P. In some embodiments, the S. pyogenes Cas9 protein comprises an R691A amino acid substitution relative to the SpCas9 sequence of NCBI accession number 7S37_P.

[0605] In some embodiments, the CRISPR gene-editing system targeting the IL4 gene is delivered to a mammalian cell via viral vector. In some embodiments, the CRISPR gene-editing system targeting the IL4 gene is delivered to a mammalian cell via an AAV vector. In some embodiments, the CRISPR gene-editing system targeting the IL4 gene is delivered to a mammalian cell via a lentiviral vector. In some embodiments, the CRISPR gene-editing system targeting the IL4 gene is delivered to a mammalian cell via a lipid nanoparticle. In some embodiments, the CRISPR gene-editing system targeting the IL4 gene is delivered to a mammalian cell via a virus-like particle. In some embodiments, the CRISPR gene-editing system targeting the IL4 gene is delivered to a mammalian cell via a liposome. In some embodiments, the CRISPR gene-editing system targeting the IL4 gene is delivered to a mammalian cell via a lipid nanocrystal.

[0606] In some embodiments, the pharmaceutical composition comprises an sgRNA having a crRNA sequence selected from SEQ ID NOs: 888-911 and a S. pyogenes Cas9 protein, optionally comprising K848A, K1003A, and R1060A amino acid substitutions or an R691A amino acid substitution, encapsulated in i) a viral vector selected from an AAV vector and a lentiviral vector; ii) a lipid nanoparticle; iii) a virus-like particle; iv) a liposome; or v) a lipid nanocrystal. In some embodiments, the pharmaceutical composition comprises an sgRNA having a crRNA sequence selected from SEQ ID NOs: 888-911 and a S. pyogenes Cas9 protein encapsulated in a lipid nanoparticle.

[0607] In various embodiments, the pharmaceutical composition comprising a CRISPR gene-editing system targeting the IL4 gene is used in a method of treating a mammal in need thereof. In some embodiments, the method treats a discogenic disease or disorder. In some embodiments, the discogenic disease or disorder is low back pain, neck pain, lumbar pain, degenerative disc disease, discogenic pain annual ligament tear, herniated disc, spinal facet joint arthritis, intervertebral disc disease, spondylosis, painful scoliosis, or spinal stenosis. In some embodiments, the discogenic disease or disorder is discogenic pain.

[0608] In some embodiments, a method is provided for treating a discogenic disease or disorder by administering a therapeutically affective amount of a pharmaceutical composition comprising a CRISPR gene-editing system targeting the IL4 gene, as described herein, to a subject in need thereof. In some embodiments, the pharmaceutical composition comprises an LNP encapsuling an sgRNA having a crRNA sequence selected from SEQ ID NOs: 888-911 and a S. pyogenes Cas9 protein. In some embodiments, the crRNA sequence is selected from SEQ ID NOs: 888-897. In some embodiments, the pharmaceutical composition is administered by intradiscal injection.

[0609] In some embodiments, a method is provided for treating a musculoskeletal disease or disorder by administering a therapeutically affective amount of a pharmaceutical composition comprising a CRISPR gene-editing system targeting the IL4 gene, as described herein, to a subject in need thereof. In some embodiments, the musculoskeletal disease or disorder is Arthritis, Infectious Intermittent joint effusion, Ankylosing spondylitis, Arthritis, Osteoarthritis, Spondylarthritis, Plantar fasciitis, Degenerative polyarthritis, Hemophilic arthropathy, Inflammatory myopathy with abundant macrophages, or Polymyositis.

[0610] In yet other embodiments, a method is provided for treating an inflammatory disease or disorder by administering a therapeutically affective amount of a pharmaceutical composition comprising a CRISPR gene-editing system targeting the IL4 gene, as described herein, to a subject in need thereof. In some embodiments, the inflammatory disease or disorder is Autoinflammatory Disease (AID), Cryopyrin Associated Periodic syndrome (CAPS), Familial Mediterranean Fever (FMF), TNF-Receptor Associated Periodic Syndrome (TRAPS), Hyper-IgD Syndrome (HIDS), Systemic Lupus Erythematosus (SLE), or Fibrosis (general).

[0611] In certain embodiments, any region of an IL4 gene (e.g., 5′ untranslated region [UTR], exon 1, exon 2, exon 3, exon 4, exon 5, any intervening intronic regions, intron/exon junctions, the 3′ UTR, or polyadenylation signal) is targeted by an RNA-guided nuclease to alter the gene. In some embodiments, the IL4 gene targeted by an RNA-guided nuclease is from a mammal. In some embodiments, the IL4 gene targeted by an RNA-guided nuclease is from a human (hIL4). In some embodiments, the IL4 gene targeted by an RNA-guided nuclease is from a dog (cIL4). In some embodiments, the IL4 gene targeted by an RNA-guided nuclease is from a horse (eIL4). In some embodiments, the IL4 gene targeted by an RNA-guided nuclease is from a cat (fIL4).

### II. IL4R

[0612] In one aspect, methods and pharmaceutical compositions are provided for treating a back or spine condition or disorder by administering a therapeutically effective amount of a CRISPR pharmaceutical composition that targets an IL4R gene to a subject in need thereof. In some embodiments, the CRISPR pharmaceutical composition comprises an RNA-guided nuclease and an sgRNA targeting the IL4R gene with a crRNA sequence selected from SEQ ID NOs: XXX-XXXX. In some embodiments, the crRNA sequence is selected from SEQ ID NOs: YYY-YYYY. In some embodiments, the crRNA sequence is selected from ZZZ-ZZZZ. In some embodiments, the RNA-guided nuclease is a Cas9 protein. In some embodiments, the Cas9 protein is an S. pyogenes Cas9 protein. In some embodiments, the S. pyogenes Cas9 protein comprises K848A, K1003A, and R1060A amino acid substitutions relative to the SpCas9 sequence of NCBI accession number 7S37_P. In some embodiments, the S. pyogenes Cas9 protein comprises an R691A amino acid substitution relative to the SpCas9 sequence of NCBI accession number 7S37_P.

[0613] In some embodiments, the CRISPR gene-editing system targeting the IL4R gene is delivered to a mammalian cell via viral vector. In some embodiments, the CRISPR gene-editing system targeting the IL4R gene is delivered to a mammalian cell via an AAV vector. In some embodiments, the CRISPR gene-editing system targeting the IL4R gene is delivered to a mammalian cell via a lentiviral vector. In some embodiments, the CRISPR gene-editing system targeting the IL4R gene is delivered to a mammalian cell via a lipid nanoparticle. In some embodiments, the CRISPR gene-editing system targeting the IL4R gene is delivered to a mammalian cell via a virus-like particle. In some embodiments, the CRISPR gene-editing system targeting the IL4R gene is delivered to a mammalian cell via a liposome. In some embodiments, the CRISPR gene-editing system targeting the IL4R gene is delivered to a mammalian cell via a lipid nanocrystal.

[0614] In some embodiments, the pharmaceutical composition comprises an sgRNA having a crRNA sequence selected from SEQ ID NOs: XXX-XXXX and a S. pyogenes Cas9 protein, optionally comprising K848A, K1003A, and R1060A amino acid substitutions or an R691A amino acid substitution, encapsulated in i) a viral vector selected from an AAV vector and a lentiviral vector; ii) a lipid nanoparticle; iii) a virus-like particle; iv) a liposome; or v) a lipid nanocrystal. In some embodiments, the pharmaceutical composition comprises an sgRNA having a crRNA sequence selected from SEQ ID NOs: XXX-XXXX and a S. pyogenes Cas9 protein encapsulated in a lipid nanoparticle.

[0615] In various embodiments, the pharmaceutical composition comprising a CRISPR gene-editing system targeting the IL4R gene is used in a method of treating a mammal in need thereof. In some embodiments, the method treats a discogenic disease or disorder. In some embodiments, the discogenic disease or disorder is low back pain, neck pain, lumbar pain, degenerative disc disease, discogenic pain annual ligament tear, herniated disc, spinal facet joint arthritis, intervertebral disc disease, spondylosis, painful scoliosis, or spinal stenosis. In some embodiments, the discogenic disease or disorder is discogenic pain.

[0616] In some embodiments, a method is provided for treating a discogenic disease or disorder by administering a therapeutically affective amount of a pharmaceutical composition comprising a CRISPR gene-editing system targeting the IL4R gene, as described herein, to a subject in need thereof. In some embodiments, the pharmaceutical composition comprises an LNP encapsuling an sgRNA having a crRNA sequence selected from SEQ ID NOs: XXX-XXXX and a S. pyogenes Cas9 protein. In some embodiments, the crRNA sequence is selected from SEQ ID NOs: YYY-YYYY. In some embodiments, the crRNA sequence is selected from SEQ ID NOs: ZZZ-ZZZZ. In some embodiments, the pharmaceutical composition is administered by intradiscal injection.

[0617] In some embodiments, a method is provided for treating a musculoskeletal disease or disorder by administering a therapeutically affective amount of a pharmaceutical composition comprising a CRISPR gene-editing system targeting the IL4R gene, as described herein, to a subject in need thereof. In some embodiments, the musculoskeletal disease or disorder is Arthritis, Infectious Intermittent joint effusion, Ankylosing spondylitis, Arthritis, Osteoarthritis, Spondylarthritis, Plantar fasciitis, Degenerative polyarthritis, Hemophilic arthropathy, Inflammatory myopathy with abundant macrophages, or Polymyositis.

[0618] In yet other embodiments, a method is provided for treating an inflammatory disease or disorder by administering a therapeutically affective amount of a pharmaceutical composition comprising a CRISPR gene-editing system targeting the IL4R gene, as described herein, to a subject in need thereof. In some embodiments, the inflammatory disease or disorder is Autoinflammatory Disease (AID), Cryopyrin Associated Periodic syndrome (CAPS), Familial Mediterranean Fever (FMF), TNF-Receptor Associated Periodic Syndrome (TRAPS), Hyper-IgD Syndrome (HIDS), Systemic Lupus Erythematosus (SLE), or Fibrosis (general).

[0619] In certain embodiments, any region of an IL4R gene (e.g., 5′ untranslated region [UTR], exon 1, exon 2, exon 3, exon 4, exon 5, exon 6, exon 7, exon 8, exon 9, exon 10, exon 11, exon 12, exon 13, exon 14, exon 15, exon 16, any intervening intronic regions, intron/exon junctions, the 3′ UTR, or polyadenylation signal) is targeted by an RNA-guided nuclease to alter the gene. In some embodiments, the IL4R gene targeted by an RNA-guided nuclease is from a mammal. In some embodiments, the IL4R gene targeted by an RNA-guided nuclease is from a human (hIL4R). In some embodiments, the IL4R gene targeted by an RNA-guided nuclease is from a dog (cIL4R). In some embodiments, the IL4R gene targeted by an RNA-guided nuclease is from a horse (eIL4R). In some embodiments, the IL4R gene targeted by an RNA-guided nuclease is from a cat (fIL4R).

### JJ. IL6

[0620] In one aspect, methods and pharmaceutical compositions are provided for treating a back or spine condition or disorder by administering a therapeutically effective amount of a CRISPR pharmaceutical composition that targets an IL6 gene to a subject in need thereof. In some embodiments, the CRISPR pharmaceutical composition comprises an RNA-guided nuclease and an sgRNA targeting the IL6 gene with a crRNA sequence selected from SEQ ID NOs: 912-928. In some embodiments, the crRNA sequence is selected from 912-921. In some embodiments, the RNA-guided nuclease is a Cas9 protein. In some embodiments, the Cas9 protein is an S. pyogenes Cas9 protein. In some embodiments, the S. pyogenes Cas9 protein comprises K848A, K1003A, and R1060A amino acid substitutions relative to the SpCas9 sequence of NCBI accession number 7S37_P. In some embodiments, the S. pyogenes Cas9 protein comprises an R691A amino acid substitution relative to the SpCas9 sequence of NCBI accession number 7S37_P.

[0621] In some embodiments, the CRISPR gene-editing system targeting the IL6 gene is delivered to a mammalian cell via viral vector. In some embodiments, the CRISPR gene-editing system targeting the IL6 gene is delivered to a mammalian cell via an AAV vector. In some embodiments, the CRISPR gene-editing system targeting the IL6 gene is delivered to a mammalian cell via a lentiviral vector. In some embodiments, the CRISPR gene-editing system targeting the IL6 gene is delivered to a mammalian cell via a lipid nanoparticle. In some embodiments, the CRISPR gene-editing system targeting the IL6 gene is delivered to a mammalian cell via a virus-like particle. In some embodiments, the CRISPR gene-editing system targeting the IL6 gene is delivered to a mammalian cell via a liposome. In some embodiments, the CRISPR gene-editing system targeting the IL6 gene is delivered to a mammalian cell via a lipid nanocrystal.

[0622] In some embodiments, the pharmaceutical composition comprises an sgRNA having a crRNA sequence selected from SEQ ID NOs: 912-928 and a S. pyogenes Cas9 protein, optionally comprising K848A, K1003A, and R1060A amino acid substitutions or an R691A amino acid substitution, encapsulated in i) a viral vector selected from an AAV vector and a lentiviral vector; ii) a lipid nanoparticle; iii) a virus-like particle; iv) a liposome; or v) a lipid nanocrystal. In some embodiments, the pharmaceutical composition comprises an sgRNA having a crRNA sequence selected from SEQ ID NOs: 912-928 and a S. pyogenes Cas9 protein encapsulated in a lipid nanoparticle.

[0623] In various embodiments, the pharmaceutical composition comprising a CRISPR gene-editing system targeting the IL6 gene is used in a method of treating a mammal in need thereof. In some embodiments, the method treats a discogenic disease or disorder. In some embodiments, the discogenic disease or disorder is low back pain, neck pain, lumbar pain, degenerative disc disease, discogenic pain annual ligament tear, herniated disc, spinal facet joint arthritis, intervertebral disc disease, spondylosis, painful scoliosis, or spinal stenosis. In some embodiments, the discogenic disease or disorder is discogenic pain.

[0624] In some embodiments, a method is provided for treating a discogenic disease or disorder by administering a therapeutically affective amount of a pharmaceutical composition comprising a CRISPR gene-editing system targeting the IL6 gene, as described herein, to a subject in need thereof. In some embodiments, the pharmaceutical composition comprises an LNP encapsuling an sgRNA having a crRNA sequence selected from SEQ ID NOs: 912-928 and a S. pyogenes Cas9 protein. In some embodiments, the crRNA sequence is selected from SEQ ID NOs: 912-921. In some embodiments, the pharmaceutical composition is administered by intradiscal injection.

[0625] In some embodiments, a method is provided for treating a musculoskeletal disease or disorder by administering a therapeutically affective amount of a pharmaceutical composition comprising a CRISPR gene-editing system targeting the IL6 gene, as described herein, to a subject in need thereof. In some embodiments, the musculoskeletal disease or disorder is Arthritis, Infectious Intermittent joint effusion, Ankylosing spondylitis, Arthritis, Osteoarthritis, Spondylarthritis, Plantar fasciitis, Degenerative polyarthritis, Hemophilic arthropathy, Inflammatory myopathy with abundant macrophages, or Polymyositis.

[0626] In yet other embodiments, a method is provided for treating an inflammatory disease or disorder by administering a therapeutically affective amount of a pharmaceutical composition comprising a CRISPR gene-editing system targeting the IL6 gene, as described herein, to a subject in need thereof. In some embodiments, the inflammatory disease or disorder is Autoinflammatory Disease (AID), Cryopyrin Associated Periodic syndrome (CAPS), Familial Mediterranean Fever (FMF), TNF-Receptor Associated Periodic Syndrome (TRAPS), Hyper-IgD Syndrome (HIDS), Systemic Lupus Erythematosus (SLE), or Fibrosis (general).

[0627] In certain embodiments, any region of an IL6 gene (e.g., 5′ untranslated region [UTR], exon 1, exon 2, exon 3, exon 4, exon 5, exon 6, any intervening intronic regions, intron/exon junctions, the 3′ UTR, or polyadenylation signal) is targeted by an RNA-guided nuclease to alter the gene. In some embodiments, the IL6 gene targeted by an RNA-guided nuclease is from a mammal. In some embodiments, the IL6 gene targeted by an RNA-guided nuclease is from a human (hIL6). In some embodiments, the IL6 gene targeted by an RNA-guided nuclease is from a dog (cIL6). In some embodiments, the IL6 gene targeted by an RNA-guided nuclease is from a horse (eIL6). In some embodiments, the IL6 gene targeted by an RNA-guided nuclease is from a cat (fIL6).

### KK. IL6R

[0628] In one aspect, methods and pharmaceutical compositions are provided for treating a back or spine condition or disorder by administering a therapeutically effective amount of a CRISPR pharmaceutical composition that targets an IL6R gene to a subject in need thereof. In some embodiments, the CRISPR pharmaceutical composition comprises an RNA-guided nuclease and an sgRNA targeting the IL6R gene with a crRNA sequence selected from SEQ ID NOs: 929-963. In some embodiments, the crRNA sequence is selected from 929-953. In some embodiments, the crRNA sequence is selected from 929-938. In some embodiments, the RNA-guided nuclease is a Cas9 protein. In some embodiments, the Cas9 protein is an S. pyogenes Cas9 protein. In some embodiments, the S. pyogenes Cas9 protein comprises K848A, K1003A, and R1060A amino acid substitutions relative to the SpCas9 sequence of NCBI accession number 7S37_P. In some embodiments, the S. pyogenes Cas9 protein comprises an R691A amino acid substitution relative to the SpCas9 sequence of NCBI accession number 7S37_P.

[0629] In some embodiments, the CRISPR gene-editing system targeting the IL6R gene is delivered to a mammalian cell via viral vector. In some embodiments, the CRISPR gene-editing system targeting the IL6R gene is delivered to a mammalian cell via an AAV vector. In some embodiments, the CRISPR gene-editing system targeting the IL6R gene is delivered to a mammalian cell via a lentiviral vector. In some embodiments, the CRISPR gene-editing system targeting the IL6R gene is delivered to a mammalian cell via a lipid nanoparticle. In some embodiments, the CRISPR gene-editing system targeting the IL6R gene is delivered to a mammalian cell via a virus-like particle. In some embodiments, the CRISPR gene-editing system targeting the IL6R gene is delivered to a mammalian cell via a liposome. In some embodiments, the CRISPR gene-editing system targeting the IL6R gene is delivered to a mammalian cell via a lipid nanocrystal.

[0630] In some embodiments, the pharmaceutical composition comprises an sgRNA having a crRNA sequence selected from SEQ ID NOs: 929-963 and a S. pyogenes Cas9 protein, optionally comprising K848A, K1003A, and R1060A amino acid substitutions or an R691A amino acid substitution, encapsulated in i) a viral vector selected from an AAV vector and a lentiviral vector; ii) a lipid nanoparticle; iii) a virus-like particle; iv) a liposome; or v) a lipid nanocrystal. In some embodiments, the pharmaceutical composition comprises an sgRNA having a crRNA sequence selected from SEQ ID NOs: 929-963 and a S. pyogenes Cas9 protein encapsulated in a lipid nanoparticle.

[0631] In various embodiments, the pharmaceutical composition comprising a CRISPR gene-editing system targeting the IL6R gene is used in a method of treating a mammal in need thereof. In some embodiments, the method treats a discogenic disease or disorder. In some embodiments, the discogenic disease or disorder is low back pain, neck pain, lumbar pain, degenerative disc disease, discogenic pain annual ligament tear, herniated disc, spinal facet joint arthritis, intervertebral disc disease, spondylosis, painful scoliosis, or spinal stenosis. In some embodiments, the discogenic disease or disorder is discogenic pain.

[0632] In some embodiments, a method is provided for treating a discogenic disease or disorder by administering a therapeutically affective amount of a pharmaceutical composition comprising a CRISPR gene-editing system targeting the IL6R gene, as described herein, to a subject in need thereof. In some embodiments, the pharmaceutical composition comprises an LNP encapsuling an sgRNA having a crRNA sequence selected from SEQ ID NOs: 929-963 and a S. pyogenes Cas9 protein. In some embodiments, the crRNA sequence is selected from SEQ ID NOs: 929-953. In some embodiments, the crRNA sequence is selected from SEQ ID NOs: 929-938. In some embodiments, the pharmaceutical composition is administered by intradiscal injection.

[0633] In some embodiments, a method is provided for treating a musculoskeletal disease or disorder by administering a therapeutically affective amount of a pharmaceutical composition comprising a CRISPR gene-editing system targeting the IL6R gene, as described herein, to a subject in need thereof. In some embodiments, the musculoskeletal disease or disorder is Arthritis, Infectious Intermittent joint effusion, Ankylosing spondylitis, Arthritis, Osteoarthritis, Spondylarthritis, Plantar fasciitis, Degenerative polyarthritis, Hemophilic arthropathy, Inflammatory myopathy with abundant macrophages, or Polymyositis.

[0634] In yet other embodiments, a method is provided for treating an inflammatory disease or disorder by administering a therapeutically affective amount of a pharmaceutical composition comprising a CRISPR gene-editing system targeting the IL6R gene, as described herein, to a subject in need thereof. In some embodiments, the inflammatory disease or disorder is Autoinflammatory Disease (AID), Cryopyrin Associated Periodic syndrome (CAPS), Familial Mediterranean Fever (FMF), TNF-Receptor Associated Periodic Syndrome (TRAPS), Hyper-IgD Syndrome (HIDS), Systemic Lupus Erythematosus (SLE), or Fibrosis (general).

[0635] In certain embodiments, any region of an IL6R gene (e.g., 5′ untranslated region [UTR], exon 1, exon 2, exon 3, exon 4, exon 5, exon 6, exon 7, exon 8, exon 9, exon 10, exon 11, exon 12, exon 13, exon 14, exon 15, any intervening intronic regions, intron/exon junctions, the 3′ UTR, or polyadenylation signal) is targeted by an RNA-guided nuclease to alter the gene. In some embodiments, the IL6R gene targeted by an RNA-guided nuclease is from a mammal. In some embodiments, the IL6R gene targeted by an RNA-guided nuclease is from a human (hIL6R). In some embodiments, the IL6R gene targeted by an RNA-guided nuclease is from a dog (cIL6R). In some embodiments, the IL6R gene targeted by an RNA-guided nuclease is from a horse (eIL6R). In some embodiments, the IL6R gene targeted by an RNA-guided nuclease is from a cat (fIL6R).

### LL. IL6ST

[0636] In one aspect, methods and pharmaceutical compositions are provided for treating a back or spine condition or disorder by administering a therapeutically effective amount of a CRISPR pharmaceutical composition that targets an IL6ST gene to a subject in need thereof. In some embodiments, the CRISPR pharmaceutical composition comprises an RNA-guided nuclease and an sgRNA targeting the IL6ST gene with a crRNA sequence selected from SEQ ID NOs: 964-990. In some embodiments, the crRNA sequence is selected from 964-988. In some embodiments, the crRNA sequence is selected from 964-973. In some embodiments, the RNA-guided nuclease is a Cas9 protein. In some embodiments, the Cas9 protein is an S. pyogenes Cas9 protein. In some embodiments, the S. pyogenes Cas9 protein comprises K848A, K1003A, and R1060A amino acid substitutions relative to the SpCas9 sequence of NCBI accession number 7S37_P. In some embodiments, the S. pyogenes Cas9 protein comprises an R691A amino acid substitution relative to the SpCas9 sequence of NCBI accession number 7S37_P.

[0637] In some embodiments, the CRISPR gene-editing system targeting the IL6ST gene is delivered to a mammalian cell via viral vector. In some embodiments, the CRISPR gene-editing system targeting the IL6ST gene is delivered to a mammalian cell via an AAV vector. In some embodiments, the CRISPR gene-editing system targeting the IL6ST gene is delivered to a mammalian cell via a lentiviral vector. In some embodiments, the CRISPR gene-editing system targeting the IL6ST gene is delivered to a mammalian cell via a lipid nanoparticle. In some embodiments, the CRISPR gene-editing system targeting the IL6ST gene is delivered to a mammalian cell via a virus-like particle. In some embodiments, the CRISPR gene-editing system targeting the IL6ST gene is delivered to a mammalian cell via a liposome. In some embodiments, the CRISPR gene-editing system targeting the IL6ST gene is delivered to a mammalian cell via a lipid nanocrystal.

[0638] In some embodiments, the pharmaceutical composition comprises an sgRNA having a crRNA sequence selected from SEQ ID NOs: 964-990 and a S. pyogenes Cas9 protein, optionally comprising K848A, K1003A, and R1060A amino acid substitutions or an R691A amino acid substitution, encapsulated in i) a viral vector selected from an AAV vector and a lentiviral vector; ii) a lipid nanoparticle; iii) a virus-like particle; iv) a liposome; or v) a lipid nanocrystal. In some embodiments, the pharmaceutical composition comprises an sgRNA having a crRNA sequence selected from SEQ ID NOs: 964-990 and a S. pyogenes Cas9 protein encapsulated in a lipid nanoparticle.

[0639] In various embodiments, the pharmaceutical composition comprising a CRISPR gene-editing system targeting the IL6ST gene is used in a method of treating a mammal in need thereof. In some embodiments, the method treats a discogenic disease or disorder. In some embodiments, the discogenic disease or disorder is low back pain, neck pain, lumbar pain, degenerative disc disease, discogenic pain annual ligament tear, herniated disc, spinal facet joint arthritis, intervertebral disc disease, spondylosis, painful scoliosis, or spinal stenosis. In some embodiments, the discogenic disease or disorder is discogenic pain.

[0640] In some embodiments, a method is provided for treating a discogenic disease or disorder by administering a therapeutically affective amount of a pharmaceutical composition comprising a CRISPR gene-editing system targeting the IL6ST gene, as described herein, to a subject in need thereof. In some embodiments, the pharmaceutical composition comprises an LNP encapsuling an sgRNA having a crRNA sequence selected from SEQ ID NOs: 964-990 and a S. pyogenes Cas9 protein. In some embodiments, the crRNA sequence is selected from SEQ ID NOs: 964-988. In some embodiments, the crRNA sequence is selected from SEQ ID NOs: 964-973. In some embodiments, the pharmaceutical composition is administered by intradiscal injection.

[0641] In some embodiments, a method is provided for treating a musculoskeletal disease or disorder by administering a therapeutically affective amount of a pharmaceutical composition comprising a CRISPR gene-editing system targeting the IL6ST gene, as described herein, to a subject in need thereof. In some embodiments, the musculoskeletal disease or disorder is Arthritis, Infectious Intermittent joint effusion, Ankylosing spondylitis, Arthritis, Osteoarthritis, Spondylarthritis, Plantar fasciitis, Degenerative polyarthritis, Hemophilic arthropathy, Inflammatory myopathy with abundant macrophages, or Polymyositis.

[0642] In yet other embodiments, a method is provided for treating an inflammatory disease or disorder by administering a therapeutically affective amount of a pharmaceutical composition comprising a CRISPR gene-editing system targeting the IL6ST gene, as described herein, to a subject in need thereof. In some embodiments, the inflammatory disease or disorder is Autoinflammatory Disease (AID), Cryopyrin Associated Periodic syndrome (CAPS), Familial Mediterranean Fever (FMF), TNF-Receptor Associated Periodic Syndrome (TRAPS), Hyper-IgD Syndrome (HIDS), Systemic Lupus Erythematosus (SLE), or Fibrosis (general).

[0643] In certain embodiments, any region of an IL6ST gene (e.g., 5′ untranslated region [UTR], exon 1, exon 2, exon 3, exon 4, exon 5, exon 6, exon 7, exon 8, exon 9, exon 10, exon 11, exon 12, exon 13, exon 14, exon 15, exon 16, exon 17, exon 18, exon 19, exon 20, any intervening intronic regions, intron/exon junctions, the 3′ UTR, or polyadenylation signal) is targeted by an RNA-guided nuclease to alter the gene. In some embodiments, the IL6ST gene targeted by an RNA-guided nuclease is from a mammal. In some embodiments, the IL6ST gene targeted by an RNA-guided nuclease is from a human (hIL6ST). In some embodiments, the IL6ST gene targeted by an RNA-guided nuclease is from a dog (cIL6ST). In some embodiments, the IL6ST gene targeted by an RNA-guided nuclease is from a horse (eIL6ST). In some embodiments, the IL6ST gene targeted by an RNA-guided nuclease is from a cat (fIL6ST).

### MM. IL10

[0644] In one aspect, methods and pharmaceutical compositions are provided for treating a back or spine condition or disorder by administering a therapeutically effective amount of a CRISPR pharmaceutical composition that targets an IL10 gene to a subject in need thereof. In some embodiments, the CRISPR pharmaceutical composition comprises an RNA-guided nuclease and an sgRNA targeting the IL10 gene with a crRNA sequence selected from SEQ ID NOs: 964-990. In some embodiments, the crRNA sequence is selected from SEQ ID NOs: 964-988. In some embodiments, the crRNA sequence is selected from 964-973. In some embodiments, the RNA-guided nuclease is a Cas9 protein. In some embodiments, the Cas9 protein is an S. pyogenes Cas9 protein. In some embodiments, the S. pyogenes Cas9 protein comprises K848A, K1003A, and R1060A amino acid substitutions relative to the SpCas9 sequence of NCBI accession number 7S37_P. In some embodiments, the S. pyogenes Cas9 protein comprises an R691A amino acid substitution relative to the SpCas9 sequence of NCBI accession number 7S37_P.

[0645] In some embodiments, the CRISPR gene-editing system targeting the IL10 gene is delivered to a mammalian cell via viral vector. In some embodiments, the CRISPR gene-editing system targeting the IL10 gene is delivered to a mammalian cell via an AAV vector. In some embodiments, the CRISPR gene-editing system targeting the IL10 gene is delivered to a mammalian cell via a lentiviral vector. In some embodiments, the CRISPR gene-editing system targeting the IL10 gene is delivered to a mammalian cell via a lipid nanoparticle. In some embodiments, the CRISPR gene-editing system targeting the IL10 gene is delivered to a mammalian cell via a virus-like particle. In some embodiments, the CRISPR gene-editing system targeting the IL10 gene is delivered to a mammalian cell via a liposome. In some embodiments, the CRISPR gene-editing system targeting the IL10 gene is delivered to a mammalian cell via a lipid nanocrystal.

[0646] In some embodiments, the pharmaceutical composition comprises an sgRNA having a crRNA sequence selected from SEQ ID NOs: 964-990 and a S. pyogenes Cas9 protein, optionally comprising K848A, K1003A, and R1060A amino acid substitutions or an R691A amino acid substitution, encapsulated in i) a viral vector selected from an AAV vector and a lentiviral vector; ii) a lipid nanoparticle; iii) a virus-like particle; iv) a liposome; or v) a lipid nanocrystal. In some embodiments, the pharmaceutical composition comprises an sgRNA having a crRNA sequence selected from SEQ ID NOs: 964-990 and a S. pyogenes Cas9 protein encapsulated in a lipid nanoparticle.

[0647] In various embodiments, the pharmaceutical composition comprising a CRISPR gene-editing system targeting the IL10 gene is used in a method of treating a mammal in need thereof. In some embodiments, the method treats a discogenic disease or disorder. In some embodiments, the discogenic disease or disorder is low back pain, neck pain, lumbar pain, degenerative disc disease, discogenic pain annual ligament tear, herniated disc, spinal facet joint arthritis, intervertebral disc disease, spondylosis, painful scoliosis, or spinal stenosis. In some embodiments, the discogenic disease or disorder is discogenic pain.

[0648] In some embodiments, a method is provided for treating a discogenic disease or disorder by administering a therapeutically affective amount of a pharmaceutical composition comprising a CRISPR gene-editing system targeting the IL10 gene, as described herein, to a subject in need thereof. In some embodiments, the pharmaceutical composition comprises an LNP encapsuling an sgRNA having a crRNA sequence selected from SEQ ID NOs: 964-990 and a S. pyogenes Cas9 protein. In some embodiments, the crRNA sequence is selected from SEQ ID NOs: 964-988. In some embodiments, the crRNA sequence is selected from SEQ ID NOs: 964-973. In some embodiments, the pharmaceutical composition is administered by intradiscal injection.

[0649] In some embodiments, a method is provided for treating a musculoskeletal disease or disorder by administering a therapeutically affective amount of a pharmaceutical composition comprising a CRISPR gene-editing system targeting the IL10 gene, as described herein, to a subject in need thereof. In some embodiments, the musculoskeletal disease or disorder is Arthritis, Infectious Intermittent joint effusion, Ankylosing spondylitis, Arthritis, Osteoarthritis, Spondylarthritis, Plantar fasciitis, Degenerative polyarthritis, Hemophilic arthropathy, Inflammatory myopathy with abundant macrophages, or Polymyositis.

[0650] In yet other embodiments, a method is provided for treating an inflammatory disease or disorder by administering a therapeutically affective amount of a pharmaceutical composition comprising a CRISPR gene-editing system targeting the IL10 gene, as described herein, to a subject in need thereof. In some embodiments, the inflammatory disease or disorder is Autoinflammatory Disease (AID), Cryopyrin Associated Periodic syndrome (CAPS), Familial Mediterranean Fever (FMF), TNF-Receptor Associated Periodic Syndrome (TRAPS), Hyper-IgD Syndrome (HIDS), Systemic Lupus Erythematosus (SLE), or Fibrosis (general).

[0651] In certain embodiments, any region of an IL10 gene (e.g., 5′ untranslated region [UTR], exon 1, exon 2, exon 3, exon 4, exon 5, exon 6, exon 7, any intervening intronic regions, intron/exon junctions, the 3′ UTR, or polyadenylation signal) is targeted by an RNA-guided nuclease to alter the gene. In some embodiments, the IL10 gene targeted by an RNA-guided nuclease is from a mammal. In some embodiments, the IL10 gene targeted by an RNA-guided nuclease is from a human (hIL10). In some embodiments, the IL10 gene targeted by an RNA-guided nuclease is from a dog (cIL10). In some embodiments, the IL10 gene targeted by an RNA-guided nuclease is from ahorse (eIL10). In some embodiments, the IL10 gene targeted by an RNA-guided nuclease is from a cat (fIL10).

### NN. IL10RA

[0652] In one aspect, methods and pharmaceutical compositions are provided for treating a back or spine condition or disorder by administering a therapeutically effective amount of a CRISPR pharmaceutical composition that targets an IL10RA gene to a subject in need thereof. In some embodiments, the CRISPR pharmaceutical composition comprises an RNA-guided nuclease and an sgRNA targeting the IL10RA gene with a crRNA sequence selected from SEQ ID NOs: 1008-1055. In some embodiments, the crRNA sequence is selected from SEQ ID NOs: 1008-1032. In some embodiments, the crRNA sequence is selected from 1008-1017. In some embodiments, the RNA-guided nuclease is a Cas9 protein. In some embodiments, the Cas9 protein is an S. pyogenes Cas9 protein. In some embodiments, the S. pyogenes Cas9 protein comprises K848A, K1003A, and R1060A amino acid substitutions relative to the SpCas9 sequence of NCBI accession number 7S37_P. In some embodiments, the S. pyogenes Cas9 protein comprises an R691A amino acid substitution relative to the SpCas9 sequence of NCBI accession number 7S37_P.

[0653] In some embodiments, the CRISPR gene-editing system targeting the IL10RA gene is delivered to a mammalian cell via viral vector. In some embodiments, the CRISPR gene-editing system targeting the IL10RA gene is delivered to a mammalian cell via an AAV vector. In some embodiments, the CRISPR gene-editing system targeting the IL10RA gene is delivered to a mammalian cell via a lentiviral vector. In some embodiments, the CRISPR gene-editing system targeting the IL10RA gene is delivered to a mammalian cell via a lipid nanoparticle. In some embodiments, the CRISPR gene-editing system targeting the IL10RA gene is delivered to a mammalian cell via a virus-like particle. In some embodiments, the CRISPR gene-editing system targeting the IL10RA gene is delivered to a mammalian cell via a liposome. In some embodiments, the CRISPR gene-editing system targeting the IL10RA gene is delivered to a mammalian cell via a lipid nanocrystal.

[0654] In some embodiments, the pharmaceutical composition comprises an sgRNA having a crRNA sequence selected from SEQ ID NOs: 1008-1055 and a S. pyogenes Cas9 protein, optionally comprising K848A, K1003A, and R1060A amino acid substitutions or an R691A amino acid substitution, encapsulated in i) a viral vector selected from an AAV vector and a lentiviral vector; ii) a lipid nanoparticle; iii) a virus-like particle; iv) a liposome; or v) a lipid nanocrystal. In some embodiments, the pharmaceutical composition comprises an sgRNA having a crRNA sequence selected from SEQ ID NOs: 1008-1055 and a S. pyogenes Cas9 protein encapsulated in a lipid nanoparticle.

[0655] In various embodiments, the pharmaceutical composition comprising a CRISPR gene-editing system targeting the IL10RA gene is used in a method of treating a mammal in need thereof. In some embodiments, the method treats a discogenic disease or disorder. In some embodiments, the discogenic disease or disorder is low back pain, neck pain, lumbar pain, degenerative disc disease, discogenic pain annual ligament tear, herniated disc, spinal facet joint arthritis, intervertebral disc disease, spondylosis, painful scoliosis, or spinal stenosis. In some embodiments, the discogenic disease or disorder is discogenic pain.

[0656] In some embodiments, a method is provided for treating a discogenic disease or disorder by administering a therapeutically affective amount of a pharmaceutical composition comprising a CRISPR gene-editing system targeting the IL10RA gene, as described herein, to a subject in need thereof. In some embodiments, the pharmaceutical composition comprises an LNP encapsuling an sgRNA having a crRNA sequence selected from SEQ ID NOs: 1008-1055 and a S. pyogenes Cas9 protein. In some embodiments, the crRNA sequence is selected from SEQ ID NOs: 1008-1032. In some embodiments, the crRNA sequence is selected from SEQ ID NOs: 1008-1017. In some embodiments, the pharmaceutical composition is administered by intradiscal injection.

[0657] In some embodiments, a method is provided for treating a musculoskeletal disease or disorder by administering a therapeutically affective amount of a pharmaceutical composition comprising a CRISPR gene-editing system targeting the IL10RA gene, as described herein, to a subject in need thereof. In some embodiments, the musculoskeletal disease or disorder is Arthritis, Infectious Intermittent joint effusion, Ankylosing spondylitis, Arthritis, Osteoarthritis, Spondylarthritis, Plantar fasciitis, Degenerative polyarthritis, Hemophilic arthropathy, inflammatory myopathy with abundant macrophages, or Polymyositis.

[0658] In yet other embodiments, a method is provided for treating an inflammatory disease or disorder by administering a therapeutically affective amount of a pharmaceutical composition comprising a CRISPR gene-editing system targeting the IL10RA gene, as described herein, to a subject in need thereof. In some embodiments, the inflammatory disease or disorder is Autoinflammatory Disease (AID), Cryopyrin Associated Periodic syndrome (CAPS), Familial Mediterranean Fever (FMF), TNF-Receptor Associated Periodic Syndrome (TRAPS), Hyper-IgD Syndrome (HIDS), Systemic Lupus Erythematosus (SLE), or Fibrosis (general).

[0659] In certain embodiments, any region of an IL10RA gene (e.g., 5′ untranslated region [UTR], exon 1, exon 2, exon 3, exon 4, exon 5, exon 6, exon 7, exon 8, exon 9, any intervening intronic regions, intron/exon junctions, the 3′ UTR, or polyadenylation signal) is targeted by an RNA-guided nuclease to alter the gene. In some embodiments, the IL10RA gene targeted by an RNA-guided nuclease is from a mammal. In some embodiments, the IL10RA gene targeted by an RNA-guided nuclease is from a human (hIL10RA). In some embodiments, the IL10RA gene targeted by an RNA-guided nuclease is from a dog (cIL10RA). In some embodiments, the IL10RA gene targeted by an RNA-guided nuclease is from a horse (eIL10RA). In some embodiments, the IL10RA gene targeted by an RNA-guided nuclease is from a cat (fIL10RA).

### OO. IL10RB

[0660] In one aspect, methods and pharmaceutical compositions are provided for treating a back or spine condition or disorder by administering a therapeutically effective amount of a CRISPR pharmaceutical composition that targets an IL10RB gene to a subject in need thereof. In some embodiments, the CRISPR pharmaceutical composition comprises an RNA-guided nuclease and an sgRNA targeting the IL10RB gene with a crRNA sequence selected from SEQ ID NOs: 1056-1082. In some embodiments, the crRNA sequence is selected from SEQ ID NOs: 1056-1080. In some embodiments, the crRNA sequence is selected from 1056-1065. In some embodiments, the RNA-guided nuclease is a Cas9 protein. In some embodiments, the Cas9 protein is an S. pyogenes Cas9 protein. In some embodiments, the S. pyogenes Cas9 protein comprises K848A, K1003A, and R1060A amino acid substitutions relative to the SpCas9 sequence of NCBI accession number 7S37_P. In some embodiments, the S. pyogenes Cas9 protein comprises an R691A amino acid substitution relative to the SpCas9 sequence of NCBI accession number 7S37_P.

[0661] In some embodiments, the CRISPR gene-editing system targeting the IL10RB gene is delivered to a mammalian cell via viral vector. In some embodiments, the CRISPR gene-editing system targeting the IL10RB gene is delivered to a mammalian cell via an AAV vector. In some embodiments, the CRISPR gene-editing system targeting the IL10RB gene is delivered to a mammalian cell via a lentiviral vector. In some embodiments, the CRISPR gene-editing system targeting the IL10RB gene is delivered to a mammalian cell via a lipid nanoparticle. In some embodiments, the CRISPR gene-editing system targeting the IL10RB gene is delivered to a mammalian cell via a virus-like particle. In some embodiments, the CRISPR gene-editing system targeting the IL10RB gene is delivered to a mammalian cell via a liposome. In some embodiments, the CRISPR gene-editing system targeting the IL10RB gene is delivered to a mammalian cell via a lipid nanocrystal.

[0662] In some embodiments, the pharmaceutical composition comprises an sgRNA having a crRNA sequence selected from SEQ ID NOs: 1056-1082 and a S. pyogenes Cas9 protein, optionally comprising K848A, K1003A, and R1060A amino acid substitutions or an R691A amino acid substitution, encapsulated in i) a viral vector selected from an AAV vector and a lentiviral vector; ii) a lipid nanoparticle; iii) a virus-like particle; iv) a liposome; or v) a lipid nanocrystal. In some embodiments, the pharmaceutical composition comprises an sgRNA having a crRNA sequence selected from SEQ ID NOs: 1056-1082 and a S. pyogenes Cas9 protein encapsulated in a lipid nanoparticle.

[0663] In various embodiments, the pharmaceutical composition comprising a CRISPR gene-editing system targeting the IL10RB gene is used in a method of treating a mammal in need thereof. In some embodiments, the method treats a discogenic disease or disorder. In some embodiments, the discogenic disease or disorder is low back pain, neck pain, lumbar pain, degenerative disc disease, discogenic pain annual ligament tear, herniated disc, spinal facet joint arthritis, intervertebral disc disease, spondylosis, painful scoliosis, or spinal stenosis. In some embodiments, the discogenic disease or disorder is discogenic pain.

[0664] In some embodiments, a method is provided for treating a discogenic disease or disorder by administering a therapeutically affective amount of a pharmaceutical composition comprising a CRISPR gene-editing system targeting the IL10RB gene, as described herein, to a subject in need thereof. In some embodiments, the pharmaceutical composition comprises an LNP encapsuling an sgRNA having a crRNA sequence selected from SEQ ID NOs: 1056-1082 and a S. pyogenes Cas9 protein. In some embodiments, the crRNA sequence is selected from SEQ ID NOs: 1056-1080. In some embodiments, the crRNA sequence is selected from SEQ ID NOs: 1056-1065. In some embodiments, the pharmaceutical composition is administered by intradiscal injection.

[0665] In some embodiments, a method is provided for treating a musculoskeletal disease or disorder by administering a therapeutically affective amount of a pharmaceutical composition comprising a CRISPR gene-editing system targeting the IL10RB gene, as described herein, to a subject in need thereof. In some embodiments, the musculoskeletal disease or disorder is Arthritis, Infectious Intermittent joint effusion, Ankylosing spondylitis, Arthritis, Osteoarthritis, Spondylarthritis, Plantar fasciitis, Degenerative polyarthritis, Hemophilic arthropathy, Inflammatory myopathy with abundant macrophages, or Polymyositis.

[0666] In yet other embodiments, a method is provided for treating an inflammatory disease or disorder by administering a therapeutically affective amount of a pharmaceutical composition comprising a CRISPR gene-editing system targeting the IL10RB gene, as described herein, to a subject in need thereof. In some embodiments, the inflammatory disease or disorder is Autoinflammatory Disease (AID), Cryopyrin Associated Periodic syndrome (CAPS), Familial Mediterranean Fever (FMF), TNF-Receptor Associated Periodic Syndrome (TRAPS), Hyper-IgD Syndrome (HIDS), Systemic Lupus Erythematosus (SLE), or Fibrosis (general).

[0667] In certain embodiments, any region of an IL10RB gene (e.g., 5′ untranslated region [UTR], exon 1, exon 2, exon 3, exon 4, exon 5, exon 6, exon 7, exon 8, exon 9, any intervening intronic regions, intron/exon junctions, the 3′ UTR, or polyadenylation signal) is targeted by an RNA-guided nuclease to alter the gene. In some embodiments, the IL10RB gene targeted by an RNA-guided nuclease is from a mammal. In some embodiments, the IL10RB gene targeted by an RNA-guided nuclease is from a human (hIL10RB). In some embodiments, the IL10RB gene targeted by an RNA-guided nuclease is from a dog (cIL10RB). In some embodiments, the IL10RB gene targeted by an RNA-guided nuclease is from a horse (eIL10RB). In some embodiments, the IL10RB gene targeted by an RNA-guided nuclease is from a cat (fIL10RB).

### PP. IL13

[0668] In one aspect, methods and pharmaceutical compositions are provided for treating a back or spine condition or disorder by administering a therapeutically effective amount of a CRISPR pharmaceutical composition that targets an IL13 gene to a subject in need thereof. In some embodiments, the CRISPR pharmaceutical composition comprises an RNA-guided nuclease and an sgRNA targeting the IL13 gene with a crRNA sequence selected from SEQ ID NOs: 1083-1104. In some embodiments, the crRNA sequence is selected from 1083-1092. In some embodiments, the RNA-guided nuclease is a Cas9 protein. In some embodiments, the Cas9 protein is an S. pyogenes Cas9 protein. In some embodiments, the S. pyogenes Cas9 protein comprises K848A, K1003A, and R1060A amino acid substitutions relative to the SpCas9 sequence of NCBI accession number 7S37_P. In some embodiments, the S. pyogenes Cas9 protein comprises an R691A amino acid substitution relative to the SpCas9 sequence of NCBI accession number 7S37_P.

[0669] In some embodiments, the CRISPR gene-editing system targeting the IL13 gene is delivered to a mammalian cell via viral vector. In some embodiments, the CRISPR gene-editing system targeting the IL13 gene is delivered to a mammalian cell via an AAV vector. In some embodiments, the CRISPR gene-editing system targeting the IL13 gene is delivered to a mammalian cell via a lentiviral vector. In some embodiments, the CRISPR gene-editing system targeting the IL13 gene is delivered to a mammalian cell via a lipid nanoparticle. In some embodiments, the CRISPR gene-editing system targeting the IL13 gene is delivered to a mammalian cell via a virus-like particle. In some embodiments, the CRISPR gene-editing system targeting the IL13 gene is delivered to a mammalian cell via a liposome. In some embodiments, the CRISPR gene-editing system targeting the IL13 gene is delivered to a mammalian cell via a lipid nanocrystal.

[0670] In some embodiments, the pharmaceutical composition comprises an sgRNA having a crRNA sequence selected from SEQ ID NOs: 1083-1104 and a S. pyogenes Cas9 protein, optionally comprising K848A, K1003A, and R1060A amino acid substitutions or an R691A amino acid substitution, encapsulated in i) a viral vector selected from an AAV vector and a lentiviral vector; ii) a lipid nanoparticle; iii) a virus-like particle; iv) a liposome; or v) a lipid nanocrystal. In some embodiments, the pharmaceutical composition comprises an sgRNA having a crRNA sequence selected from SEQ ID NOs: 1083-1104 and a S. pyogenes Cas9 protein encapsulated in a lipid nanoparticle.

[0671] In various embodiments, the pharmaceutical composition comprising a CRISPR gene-editing system targeting the IL13 gene is used in a method of treating a mammal in need thereof. In some embodiments, the method treats a discogenic disease or disorder. In some embodiments, the discogenic disease or disorder is low back pain, neck pain, lumbar pain, degenerative disc disease, discogenic pain annual ligament tear, herniated disc, spinal facet joint arthritis, intervertebral disc disease, spondylosis, painful scoliosis, or spinal stenosis. In some embodiments, the discogenic disease or disorder is discogenic pain.

[0672] In some embodiments, a method is provided for treating a discogenic disease or disorder by administering a therapeutically affective amount of a pharmaceutical composition comprising a CRISPR gene-editing system targeting the IL13 gene, as described herein, to a subject in need thereof. In some embodiments, the pharmaceutical composition comprises an LNP encapsuling an sgRNA having a crRNA sequence selected from SEQ ID NOs: 1083-1104 and a S. pyogenes Cas9 protein. In some embodiments, the crRNA sequence is selected from SEQ ID NOs: 1083-1092. In some embodiments, the pharmaceutical composition is administered by intradiscal injection.

[0673] In some embodiments, a method is provided for treating a musculoskeletal disease or disorder by administering a therapeutically affective amount of a pharmaceutical composition comprising a CRISPR gene-editing system targeting the IL13 gene, as described herein, to a subject in need thereof. In some embodiments, the musculoskeletal disease or disorder is Arthritis, Infectious Intermittent joint effusion, Ankylosing spondylitis, Arthritis, Osteoarthritis, Spondylarthritis, Plantar fasciitis, Degenerative polyarthritis, Hemophilic arthropathy, Inflammatory myopathy with abundant macrophages, or Polymyositis.

[0674] In yet other embodiments, a method is provided for treating an inflammatory disease or disorder by administering a therapeutically affective amount of a pharmaceutical composition comprising a CRISPR gene-editing system targeting the IL13 gene, as described herein, to a subject in need thereof. In some embodiments, the inflammatory disease or disorder is Autoinflammatory Disease (AID), Cryopyrin Associated Periodic syndrome (CAPS), Familial Mediterranean Fever (FMF), TNF-Receptor Associated Periodic Syndrome (TRAPS), Hyper-IgD Syndrome (HIDS), Systemic Lupus Erythematosus (SLE), or Fibrosis (general).

[0675] In certain embodiments, any region of an IL13 gene (e.g., 5′ untranslated region [UTR], exon 1, exon 2, exon 3, exon 4, exon 5, exon 6, any intervening intronic regions, intron/exon junctions, the 3′ UTR, or polyadenylation signal) is targeted by an RNA-guided nuclease to alter the gene. In some embodiments, the IL13 gene targeted by an RNA-guided nuclease is from a mammal. In some embodiments, the IL13 gene targeted by an RNA-guided nuclease is from a human (hIL13). In some embodiments, the IL13 gene targeted by an RNA-guided nuclease is from a dog (cIL13). In some embodiments, the IL13 gene targeted by an RNA-guided nuclease is from a horse (eIL13). In some embodiments, the IL13 gene targeted by an RNA-guided nuclease is from a cat (fIL13).

### QQ. IL13RA1

[0676] In one aspect, methods and pharmaceutical compositions are provided for treating a back or spine condition or disorder by administering a therapeutically effective amount of a CRISPR pharmaceutical composition that targets an IL13RA1 gene to a subject in need thereof. In some embodiments, the CRISPR pharmaceutical composition comprises an RNA-guided nuclease and an sgRNA targeting the IL13RA1 gene with a crRNA sequence selected from SEQ ID NOs: 1105-1130. In some embodiments, the crRNA sequence is selected from SEQ ID NOs: 1105-1129. In some embodiments, the crRNA sequence is selected from 1105-1114. In some embodiments, the RNA-guided nuclease is a Cas9 protein. In some embodiments, the Cas9 protein is an S. pyogenes Cas9 protein. In some embodiments, the S. pyogenes Cas9 protein comprises K848A, K1003A, and R1060A amino acid substitutions relative to the SpCas9 sequence of NCBI accession number 7S37_P. In some embodiments, the S. pyogenes Cas9 protein comprises an R691A amino acid substitution relative to the SpCas9 sequence of NCBI accession number 7S37_P.

[0677] In some embodiments, the CRISPR gene-editing system targeting the IL13RA1 gene is delivered to a mammalian cell via viral vector. In some embodiments, the CRISPR gene-editing system targeting the IL13RA1 gene is delivered to a mammalian cell via an AAV vector. In some embodiments, the CRISPR gene-editing system targeting the IL13RA1 gene is delivered to a mammalian cell via a lentiviral vector. In some embodiments, the CRISPR gene-editing system targeting the IL13RA1 gene is delivered to a mammalian cell via a lipid nanoparticle. In some embodiments, the CRISPR gene-editing system targeting the IL13RA1 gene is delivered to a mammalian cell via a virus-like particle. In some embodiments, the CRISPR gene-editing system targeting the IL13RA1 gene is delivered to a mammalian cell via a liposome. In some embodiments, the CRISPR gene-editing system targeting the IL13RA1 gene is delivered to a mammalian cell via a lipid nanocrystal.

[0678] In some embodiments, the pharmaceutical composition comprises an sgRNA having a crRNA sequence selected from SEQ ID NOs: 1105-1130 and a S. pyogenes Cas9 protein, optionally comprising K848A, K1003A, and R1060A amino acid substitutions or an R691A amino acid substitution, encapsulated in i) a viral vector selected from an AAV vector and a lentiviral vector; ii) a lipid nanoparticle; iii) a virus-like particle; iv) a liposome; or v) a lipid nanocrystal. In some embodiments, the pharmaceutical composition comprises an sgRNA having a crRNA sequence selected from SEQ ID NOs: 1105-1130 and a S. pyogenes Cas9 protein encapsulated in a lipid nanoparticle.

[0679] In various embodiments, the pharmaceutical composition comprising a CRISPR gene-editing system targeting the IL13RA1 gene is used in a method of treating a mammal in need thereof. In some embodiments, the method treats a discogenic disease or disorder. In some embodiments, the discogenic disease or disorder is low back pain, neck pain, lumbar pain, degenerative disc disease, discogenic pain annual ligament tear, herniated disc, spinal facet joint arthritis, intervertebral disc disease, spondylosis, painful scoliosis, or spinal stenosis. In some embodiments, the discogenic disease or disorder is discogenic pain.

[0680] In some embodiments, a method is provided for treating a discogenic disease or disorder by administering a therapeutically affective amount of a pharmaceutical composition comprising a CRISPR gene-editing system targeting the IL13RA1 gene, as described herein, to a subject in need thereof. In some embodiments, the pharmaceutical composition comprises an LNP encapsuling an sgRNA having a crRNA sequence selected from SEQ ID NOs: 1105-1130 and a S. pyogenes Cas9 protein. In some embodiments, the crRNA sequence is selected from SEQ ID NOs: 1105-1129. In some embodiments, the crRNA sequence is selected from SEQ ID NOs: 1105-1114. In some embodiments, the pharmaceutical composition is administered by intradiscal injection.

[0681] In some embodiments, a method is provided for treating a musculoskeletal disease or disorder by administering a therapeutically affective amount of a pharmaceutical composition comprising a CRISPR gene-editing system targeting the IL13RA1 gene, as described herein, to a subject in need thereof. In some embodiments, the musculoskeletal disease or disorder is Arthritis, Infectious Intermittent joint effusion, Ankylosing spondylitis, Arthritis, Osteoarthritis, Spondylarthritis, Plantar fasciitis, Degenerative polyarthritis, Hemophilic arthropathy, Inflammatory myopathy with abundant macrophages, or Polymyositis.

[0682] In yet other embodiments, a method is provided for treating an inflammatory disease or disorder by administering a therapeutically affective amount of a pharmaceutical composition comprising a CRISPR gene-editing system targeting the IL13RA1 gene, as described herein, to a subject in need thereof. In some embodiments, the inflammatory disease or disorder is Autoinflammatory Disease (AID), Cryopyrin Associated Periodic syndrome (CAPS), Familial Mediterranean Fever (FMF), TNF-Receptor Associated Periodic Syndrome (TRAPS), Hyper-IgD Syndrome (HIDS), Systemic Lupus Erythematosus (SLE), or Fibrosis (general).

[0683] In certain embodiments, any region of an IL13RA1 gene (e.g., 5′ untranslated region [UTR], exon 1, exon 2, exon 3, exon 4, exon 5, exon 6, exon 7, exon 8, exon 9, exon 10, exon 11, exon 12, any intervening intronic regions, intron/exon junctions, the 3′ UTR, or polyadenylation signal) is targeted by an RNA-guided nuclease to alter the gene. In some embodiments, the IL13RA1 gene targeted by an RNA-guided nuclease is from a mammal. In some embodiments, the IL13RA1 gene targeted by an RNA-guided nuclease is from a human (hIL13RA1). In some embodiments, the IL13RA1 gene targeted by an RNA-guided nuclease is from a dog (cIL13RA1). In some embodiments, the IL13RA1 gene targeted by an RNA-guided nuclease is from a horse (eIL13RA1). In some embodiments, the IL13RA1 gene targeted by an RNA-guided nuclease is from a cat (fIL13RA1).

### RR. IL13RA2

[0684] In one aspect, methods and pharmaceutical compositions are provided for treating a back or spine condition or disorder by administering a therapeutically effective amount of a CRISPR pharmaceutical composition that targets an IL13RA2 gene to a subject in need thereof. In some embodiments, the CRISPR pharmaceutical composition comprises an RNA-guided nuclease and an sgRNA targeting the IL13RA2 gene with a crRNA sequence selected from SEQ ID NOs: 1131-1147. In some embodiments, the crRNA sequence is selected from 1131-1140. In some embodiments, the RNA-guided nuclease is a Cas9 protein. In some embodiments, the Cas9 protein is an S. pyogenes Cas9 protein. In some embodiments, the S. pyogenes Cas9 protein comprises K848A, K1003A, and R1060A amino acid substitutions relative to the SpCas9 sequence of NCBI accession number 7S37_P. In some embodiments, the S. pyogenes Cas9 protein comprises an R691A amino acid substitution relative to the SpCas9 sequence of NCBI accession number 7S37_P.

[0685] In some embodiments, the CRISPR gene-editing system targeting the IL13RA2 gene is delivered to a mammalian cell via viral vector. In some embodiments, the CRISPR gene-editing system targeting the IL13RA2 gene is delivered to a mammalian cell via an AAV vector. In some embodiments, the CRISPR gene-editing system targeting the IL13RA2 gene is delivered to a mammalian cell via a lentiviral vector. In some embodiments, the CRISPR gene-editing system targeting the IL13RA2 gene is delivered to a mammalian cell via a lipid nanoparticle. In some embodiments, the CRISPR gene-editing system targeting the IL13RA2 gene is delivered to a mammalian cell via a virus-like particle. In some embodiments, the CRISPR gene-editing system targeting the IL13RA2 gene is delivered to a mammalian cell via a liposome. In some embodiments, the CRISPR gene-editing system targeting the IL13RA2 gene is delivered to a mammalian cell via a lipid nanocrystal.

[0686] In some embodiments, the pharmaceutical composition comprises an sgRNA having a crRNA sequence selected from SEQ ID NOs: 1131-1147 and a S. pyogenes Cas9 protein, optionally comprising K848A, K1003A, and R1060A amino acid substitutions or an R691A amino acid substitution, encapsulated in i) a viral vector selected from an AAV vector and a lentiviral vector; ii) a lipid nanoparticle; iii) a virus-like particle; iv) a liposome; or v) a lipid nanocrystal. In some embodiments, the pharmaceutical composition comprises an sgRNA having a crRNA sequence selected from SEQ ID NOs: 1131-1147 and a S. pyogenes Cas9 protein encapsulated in a lipid nanoparticle.

[0687] In various embodiments, the pharmaceutical composition comprising a CRISPR gene-editing system targeting the IL13RA2 gene is used in a method of treating a mammal in need thereof. In some embodiments, the method treats a discogenic disease or disorder. In some embodiments, the discogenic disease or disorder is low back pain, neck pain, lumbar pain, degenerative disc disease, discogenic pain annual ligament tear, herniated disc, spinal facet joint arthritis, intervertebral disc disease, spondylosis, painful scoliosis, or spinal stenosis. In some embodiments, the discogenic disease or disorder is discogenic pain.

[0688] In some embodiments, a method is provided for treating a discogenic disease or disorder by administering a therapeutically affective amount of a pharmaceutical composition comprising a CRISPR gene-editing system targeting the IL13RA2 gene, as described herein, to a subject in need thereof. In some embodiments, the pharmaceutical composition comprises an LNP encapsuling an sgRNA having a crRNA sequence selected from SEQ ID NOs: 1131-1147 and a S. pyogenes Cas9 protein. In some embodiments, the crRNA sequence is selected from SEQ ID NOs: 1131-1140. In some embodiments, the pharmaceutical composition is administered by intradiscal injection.

[0689] In some embodiments, a method is provided for treating a musculoskeletal disease or disorder by administering a therapeutically affective amount of a pharmaceutical composition comprising a CRISPR gene-editing system targeting the IL13RA2 gene, as described herein, to a subject in need thereof. In some embodiments, the musculoskeletal disease or disorder is Arthritis, Infectious Intermittent joint effusion, Ankylosing spondylitis, Arthritis, Osteoarthritis, Spondylarthritis, Plantar fasciitis, Degenerative polyarthritis, Hemophilic arthropathy, Inflammatory myopathy with abundant macrophages, or Polymyositis.

[0690] In yet other embodiments, a method is provided for treating an inflammatory disease or disorder by administering a therapeutically affective amount of a pharmaceutical composition comprising a CRISPR gene-editing system targeting the IL13RA2 gene, as described herein, to a subject in need thereof. In some embodiments, the inflammatory disease or disorder is Autoinflammatory Disease (AID), Cryopyrin Associated Periodic syndrome (CAPS), Familial Mediterranean Fever (FMF), TNF-Receptor Associated Periodic Syndrome (TRAPS), Hyper-IgD Syndrome (HIDS), Systemic Lupus Erythematosus (SLE), or Fibrosis (general).

[0691] In certain embodiments, any region of an IL13RA2 gene (e.g., 5′ untranslated region [UTR], exon 1, exon 2, exon 3, exon 4, exon 5, exon 6, exon 7, exon 8, exon 9, exon 10, exon 11, exon 12, exon 13, exon 14, exon 15, exon 16, exon 17, exon 18, any intervening intronic regions, intron/exon junctions, the 3′ UTR, or polyadenylation signal) is targeted by an RNA-guided nuclease to alter the gene. In some embodiments, the IL13RA2 gene targeted by an RNA-guided nuclease is from a mammal. In some embodiments, the IL13RA2 gene targeted by an RNA-guided nuclease is from a human (hIL13RA2). In some embodiments, the IL13RA2 gene targeted by an RNA-guided nuclease is from a dog (cIL13RA2). In some embodiments, the IL13RA2 gene targeted by an RNA-guided nuclease is from a horse (eIL13RA2). In some embodiments, the IL13RA2 gene targeted by an RNA-guided nuclease is from a cat (fIL13RA2).

### SS. IL17A

[0692] In one aspect, methods and pharmaceutical compositions are provided for treating a back or spine condition or disorder by administering a therapeutically effective amount of a CRISPR pharmaceutical composition that targets an IL17A gene to a subject in need thereof. In some embodiments, the CRISPR pharmaceutical composition comprises an RNA-guided nuclease and an sgRNA targeting the IL17A gene with a crRNA sequence selected from SEQ ID NOs: 1148-1173. In some embodiments, the crRNA sequence is selected from SEQ ID NOs: 1148-1172. In some embodiments, the crRNA sequence is selected from 1148-1157. In some embodiments, the RNA-guided nuclease is a Cas9 protein. In some embodiments, the Cas9 protein is an S. pyogenes Cas9 protein. In some embodiments, the S. pyogenes Cas9 protein comprises K848A, K1003A, and R1060A amino acid substitutions relative to the SpCas9 sequence of NCBI accession number 7537_P. In some embodiments, the S. pyogenes Cas9 protein comprises an R691A amino acid substitution relative to the SpCas9 sequence of NCBI accession number 7S37_P.

[0693] In some embodiments, the CRISPR gene-editing system targeting the IL17A gene is delivered to a mammalian cell via viral vector. In some embodiments, the CRISPR gene-editing system targeting the IL17A gene is delivered to a mammalian cell via an AAV vector. In some embodiments, the CRISPR gene-editing system targeting the IL17A gene is delivered to a mammalian cell via a lentiviral vector. In some embodiments, the CRISPR gene-editing system targeting the IL17A gene is delivered to a mammalian cell via a lipid nanoparticle. In some embodiments, the CRISPR gene-editing system targeting the IL17A gene is delivered to a mammalian cell via a virus-like particle. In some embodiments, the CRISPR gene-editing system targeting the IL17A gene is delivered to a mammalian cell via a liposome. In some embodiments, the CRISPR gene-editing system targeting the IL17A gene is delivered to a mammalian cell via a lipid nanocrystal.

[0694] In some embodiments, the pharmaceutical composition comprises an sgRNA having a crRNA sequence selected from SEQ ID NOs: 1148-1173 and a S. pyogenes Cas9 protein, optionally comprising K848A, K1003A, and R1060A amino acid substitutions or an R691A amino acid substitution, encapsulated in i) a viral vector selected from an AAV vector and a lentiviral vector; ii) a lipid nanoparticle; iii) a virus-like particle; iv) a liposome; or v) a lipid nanocrystal. In some embodiments, the pharmaceutical composition comprises an sgRNA having a crRNA sequence selected from SEQ ID NOs: 1148-1173 and a S. pyogenes Cas9 protein encapsulated in a lipid nanoparticle.

[0695] In various embodiments, the pharmaceutical composition comprising a CRISPR gene-editing system targeting the IL17A gene is used in a method of treating a mammal in need thereof. In some embodiments, the method treats a discogenic disease or disorder. In some embodiments, the discogenic disease or disorder is low back pain, neck pain, lumbar pain, degenerative disc disease, discogenic pain annual ligament tear, herniated disc, spinal facet joint arthritis, intervertebral disc disease, spondylosis, painful scoliosis, or spinal stenosis. In some embodiments, the discogenic disease or disorder is discogenic pain.

[0696] In some embodiments, a method is provided for treating a discogenic disease or disorder by administering a therapeutically affective amount of a pharmaceutical composition comprising a CRISPR gene-editing system targeting the IL17A gene, as described herein, to a subject in need thereof. In some embodiments, the pharmaceutical composition comprises an LNP encapsuling an sgRNA having a crRNA sequence selected from SEQ ID NOs: 1148-1173 and a S. pyogenes Cas9 protein. In some embodiments, the crRNA sequence is selected from SEQ ID NOs: 1148-1172. In some embodiments, the crRNA sequence is selected from SEQ ID NOs: 1148-1157. In some embodiments, the pharmaceutical composition is administered by intradiscal injection.

[0697] In some embodiments, a method is provided for treating a musculoskeletal disease or disorder by administering a therapeutically affective amount of a pharmaceutical composition comprising a CRISPR gene-editing system targeting the IL17A gene, as described herein, to a subject in need thereof. In some embodiments, the musculoskeletal disease or disorder is Arthritis, Infectious Intermittent joint effusion, Ankylosing spondylitis, Arthritis, Osteoarthritis, Spondylarthritis, Plantar fasciitis, Degenerative polyarthritis, Hemophilic arthropathy, Inflammatory myopathy with abundant macrophages, or Polymyositis.

[0698] In yet other embodiments, a method is provided for treating an inflammatory disease or disorder by administering a therapeutically affective amount of a pharmaceutical composition comprising a CRISPR gene-editing system targeting the IL17A gene, as described herein, to a subject in need thereof. In some embodiments, the inflammatory disease or disorder is Autoinflammatory Disease (AID), Cryopyrin Associated Periodic syndrome (CAPS), Familial Mediterranean Fever (FMF), TNF-Receptor Associated Periodic Syndrome (TRAPS), Hyper-IgD Syndrome (HIDS), Systemic Lupus Erythematosus (SLE), or Fibrosis (general).

[0699] In certain embodiments, any region of an IL17A gene (e.g., 5′ untranslated region [UTR], exon 1, exon 2, exon 3, any intervening intronic regions, intron/exon junctions, the 3′ UTR, or polyadenylation signal) is targeted by an RNA-guided nuclease to alter the gene. In some embodiments, the IL17A gene targeted by an RNA-guided nuclease is from a mammal. In some embodiments, the IL17A gene targeted by an RNA-guided nuclease is from a human (hIL17A). In some embodiments, the IL17A gene targeted by an RNA-guided nuclease is from a dog (cIL17A). In some embodiments, the IL17A gene targeted by an RNA-guided nuclease is from a horse (eIL17A). In some embodiments, the IL17A gene targeted by an RNA-guided nuclease is from a cat (fIL17A).

### TT. IL17RA

[0700] In one aspect, methods and pharmaceutical compositions are provided for treating a back or spine condition or disorder by administering a therapeutically effective amount of a CRISPR pharmaceutical composition that targets an IL17RA gene to a subject in need thereof. In some embodiments, the CRISPR pharmaceutical composition comprises an RNA-guided nuclease and an sgRNA targeting the IL17RA gene with a crRNA sequence selected from SEQ ID NOs: 1174-1221. In some embodiments, the crRNA sequence is selected from SEQ ID NOs: 1174-1198. In some embodiments, the crRNA sequence is selected from 1174-1183. In some embodiments, the RNA-guided nuclease is a Cas9 protein. In some embodiments, the Cas9 protein is an S. pyogenes Cas9 protein. In some embodiments, the S. pyogenes Cas9 protein comprises K848A, K1003A, and R1060A amino acid substitutions relative to the SpCas9 sequence of NCBI accession number 7S37_P. In some embodiments, the S. pyogenes Cas9 protein comprises an R691A amino acid substitution relative to the SpCas9 sequence of NCBI accession number 7S37_P.

[0701] In some embodiments, the CRISPR gene-editing system targeting the IL17RA gene is delivered to a mammalian cell via viral vector. In some embodiments, the CRISPR gene-editing system targeting the IL17RA gene is delivered to a mammalian cell via an AAV vector. In some embodiments, the CRISPR gene-editing system targeting the IL17RA gene is delivered to a mammalian cell via a lentiviral vector. In some embodiments, the CRISPR gene-editing system targeting the IL17RA gene is delivered to a mammalian cell via a lipid nanoparticle. In some embodiments, the CRISPR gene-editing system targeting the IL17RA gene is delivered to a mammalian cell via a virus-like particle. In some embodiments, the CRISPR gene-editing system targeting the IL17RA gene is delivered to a mammalian cell via a liposome. In some embodiments, the CRISPR gene-editing system targeting the IL17RA gene is delivered to a mammalian cell via a lipid nanocrystal.

[0702] In some embodiments, the pharmaceutical composition comprises an sgRNA having a crRNA sequence selected from SEQ ID NOs: 1174-1221 and a S. pyogenes Cas9 protein, optionally comprising K848A, K1003A, and R1060A amino acid substitutions or an R691A amino acid substitution, encapsulated in i) a viral vector selected from an AAV vector and a lentiviral vector; ii) a lipid nanoparticle; iii) a virus-like particle; iv) a liposome; or v) a lipid nanocrystal. In some embodiments, the pharmaceutical composition comprises an sgRNA having a crRNA sequence selected from SEQ ID NOs: 1174-1221 and a S. pyogenes Cas9 protein encapsulated in a lipid nanoparticle.

[0703] In various embodiments, the pharmaceutical composition comprising a CRISPR gene-editing system targeting the IL17RA gene is used in a method of treating a mammal in need thereof. In some embodiments, the method treats a discogenic disease or disorder. In some embodiments, the discogenic disease or disorder is low back pain, neck pain, lumbar pain, degenerative disc disease, discogenic pain annual ligament tear, herniated disc, spinal facet joint arthritis, intervertebral disc disease, spondylosis, painful scoliosis, or spinal stenosis. In some embodiments, the discogenic disease or disorder is discogenic pain.

[0704] In some embodiments, a method is provided for treating a discogenic disease or disorder by administering a therapeutically affective amount of a pharmaceutical composition comprising a CRISPR gene-editing system targeting the IL17RA gene, as described herein, to a subject in need thereof. In some embodiments, the pharmaceutical composition comprises an LNP encapsuling an sgRNA having a crRNA sequence selected from SEQ ID NOs: 1174-1221 and a S. pyogenes Cas9 protein. In some embodiments, the crRNA sequence is selected from SEQ ID NOs: 1174-1198. In some embodiments, the crRNA sequence is selected from SEQ ID NOs: 1174-1183. In some embodiments, the pharmaceutical composition is administered by intradiscal injection.

[0705] In some embodiments, a method is provided for treating a musculoskeletal disease or disorder by administering a therapeutically affective amount of a pharmaceutical composition comprising a CRISPR gene-editing system targeting the IL17RA gene, as described herein, to a subject in need thereof. In some embodiments, the musculoskeletal disease or disorder is Arthritis. Infectious Intermittent joint effusion, Ankylosing spondylitis, Arthritis, Osteoarthritis, Spondylarthritis, Plantar fasciitis, Degenerative polyarthritis, Hemophilic arthropathy, Inflammatory myopathy with abundant macrophages, or Polymyositis.

[0706] In yet other embodiments, a method is provided for treating an inflammatory disease or disorder by administering a therapeutically affective amount of a pharmaceutical composition comprising a CRISPR gene-editing system targeting the IL17RA gene, as described herein, to a subject in need thereof. In some embodiments, the inflammatory disease or disorder is Autoinflammatory Disease (AID), Cryopyrin Associated Periodic syndrome (CAPS), Familial Mediterranean Fever (FMF), TNF-Receptor Associated Periodic Syndrome (TRAPS), Hyper-IgD Syndrome (HIDS), Systemic Lupus Erythematosus (SLE), or Fibrosis (general).

[0707] In certain embodiments, any region of an IL17RA gene (e.g., 5′ untranslated region [UTR], exon 1, exon 2, exon 3, exon 4, exon 5, exon 6, exon 7, exon 8, exon 9, exon 10, exon 11, exon 12, exon 13, any intervening intronic regions, intron/exon junctions, the 3′ UTR, or polyadenylation signal) is targeted by an RNA-guided nuclease to alter the gene. In some embodiments, the IL17RA gene targeted by an RNA-guided nuclease is from a mammal. In some embodiments, the IL17RA gene targeted by an RNA-guided nuclease is from a human (hIL17RA). In some embodiments, the IL17RA gene targeted by an RNA-guided nuclease is from a dog (cIL17RA). In some embodiments, the IL17RA gene targeted by an RNA-guided nuclease is from a horse (eIL17RA). In some embodiments, the IL17RA gene targeted by an RNA-guided nuclease is from a cat (fIL17RA).

### UU. IL18

[0708] In one aspect, methods and pharmaceutical compositions are provided for treating a back or spine condition or disorder by administering a therapeutically effective amount of a CRISPR pharmaceutical composition that targets an IL18 gene to a subject in need thereof. In some embodiments, the CRISPR pharmaceutical composition comprises an RNA-guided nuclease and an sgRNA targeting the IL18 gene with a crRNA sequence selected from SEQ ID NOs: 1222-1238. In some embodiments, the crRNA sequence is selected from 1222-1231. In some embodiments, the RNA-guided nuclease is a Cas9 protein. In some embodiments, the Cas9 protein is an S. pyogenes Cas9 protein. In some embodiments, the S. pyogenes Cas9 protein comprises K848A, K1003A, and R1060A amino acid substitutions relative to the SpCas9 sequence of NCBI accession number 7S37_P. In some embodiments, the S. pyogenes Cas9 protein comprises an R691A amino acid substitution relative to the SpCas9 sequence of NCBI accession number 7S37_P.

[0709] In some embodiments, the CRISPR gene-editing system targeting the IL18 gene is delivered to a mammalian cell via viral vector. In some embodiments, the CRISPR gene-editing system targeting the IL18 gene is delivered to a mammalian cell via an AAV vector. In some embodiments, the CRISPR gene-editing system targeting the IL18 gene is delivered to a mammalian cell via a lentiviral vector. In some embodiments, the CRISPR gene-editing system targeting the IL18 gene is delivered to a mammalian cell via a lipid nanoparticle. In some embodiments, the CRISPR gene-editing system targeting the IL18 gene is delivered to a mammalian cell via a virus-like particle. In some embodiments, the CRISPR gene-editing system targeting the IL18 gene is delivered to a mammalian cell via a liposome. In some embodiments, the CRISPR gene-editing system targeting the IL18 gene is delivered to a mammalian cell via a lipid nanocrystal.

[0710] In some embodiments, the pharmaceutical composition comprises an sgRNA having a crRNA sequence selected from SEQ ID NOs: 1222-1238 and a S. pyogenes Cas9 protein, optionally comprising K848A, K1003A, and R1060A amino acid substitutions or an R691A amino acid substitution, encapsulated in i) a viral vector selected from an AAV vector and a lentiviral vector; ii) a lipid nanoparticle; iii) a virus-like particle; iv) a liposome; or v) a lipid nanocrystal. In some embodiments, the pharmaceutical composition comprises an sgRNA having a crRNA sequence selected from SEQ ID NOs: 1222-1238 and a S. pyogenes Cas9 protein encapsulated in a lipid nanoparticle.

[0711] In various embodiments, the pharmaceutical composition comprising a CRISPR gene-editing system targeting the IL18 gene is used in a method of treating a mammal in need thereof. In some embodiments, the method treats a discogenic disease or disorder. In some embodiments, the discogenic disease or disorder is low back pain, neck pain, lumbar pain, degenerative disc disease, discogenic pain annual ligament tear, herniated disc, spinal facet joint arthritis, intervertebral disc disease, spondylosis, painful scoliosis, or spinal stenosis. In some embodiments, the discogenic disease or disorder is discogenic pain.

[0712] In some embodiments, a method is provided for treating a discogenic disease or disorder by administering a therapeutically affective amount of a pharmaceutical composition comprising a CRISPR gene-editing system targeting the IL18 gene, as described herein, to a subject in need thereof. In some embodiments, the pharmaceutical composition comprises an LNP encapsuling an sgRNA having a crRNA sequence selected from SEQ ID NOs: 1222-1238 and a S. pyogenes Cas9 protein. In some embodiments, the crRNA sequence is selected from SEQ ID NOs: 1222-1231. In some embodiments, the pharmaceutical composition is administered by intradiscal injection.

[0713] In some embodiments, a method is provided for treating a musculoskeletal disease or disorder by administering a therapeutically affective amount of a pharmaceutical composition comprising a CRISPR gene-editing system targeting the IL18 gene, as described herein, to a subject in need thereof. In some embodiments, the musculoskeletal disease or disorder is Arthritis, Infectious Intermittent joint effusion, Ankylosing spondylitis, Arthritis, Osteoarthritis, Spondylarthritis, Plantar fasciitis, Degenerative polyarthritis, Hemophilic arthropathy, Inflammatory myopathy with abundant macrophages, or Polymyositis.

[0714] In yet other embodiments, a method is provided for treating an inflammatory disease or disorder by administering a therapeutically affective amount of a pharmaceutical composition comprising a CRISPR gene-editing system targeting the IL18 gene, as described herein, to a subject in need thereof. In some embodiments, the inflammatory disease or disorder is Autoinflammatory Disease (AID), Cryopyrin Associated Periodic syndrome (CAPS), Familial Mediterranean Fever (FMF), TNF-Receptor Associated Periodic Syndrome (TRAPS), Hyper-IgD Syndrome (HIDS), Systemic Lupus Erythematosus (SLE), or Fibrosis (general).

[0715] In certain embodiments, any region of an IL18 gene (e.g., 5′ untranslated region [UTR], exon 1, exon 2, exon 3, exon 4, exon 5, exon 6, exon 7, exon 8, exon 9, any intervening intronic regions, intron/exon junctions, the 3′ UTR, or polyadenylation signal) is targeted by an RNA-guided nuclease to alter the gene. In some embodiments, the IL18 gene targeted by an RNA-guided nuclease is from a mammal. In some embodiments, the IL18 gene targeted by an RNA-guided nuclease is from a human (hIL18). In some embodiments, the IL18 gene targeted by an RNA-guided nuclease is from a dog (cIL18). In some embodiments, the IL18 gene targeted by an RNA-guided nuclease is from a horse (eIL18). In some embodiments, the IL18 gene targeted by an RNA-guided nuclease is from a cat (fIL18).

### VV. IL18R1

[0716] In one aspect, methods and pharmaceutical compositions are provided for treating a back or spine condition or disorder by administering a therapeutically effective amount of a CRISPR pharmaceutical composition that targets an IL18R1 gene to a subject in need thereof. In some embodiments, the CRISPR pharmaceutical composition comprises an RNA-guided nuclease and an sgRNA targeting the IL18R1 gene with a crRNA sequence selected from SEQ ID NOs: 1239-1262. In some embodiments, the crRNA sequence is selected from 1239-1248. In some embodiments, the RNA-guided nuclease is a Cas9 protein. In some embodiments, the Cas9 protein is an S. pyogenes Cas9 protein. In some embodiments, the S. pyogenes Cas9 protein comprises K848A, K1003A, and R1060A amino acid substitutions relative to the SpCas9 sequence of NCBI accession number 7S37_P. In some embodiments, the S. pyogenes Cas9 protein comprises an R691A amino acid substitution relative to the SpCas9 sequence of NCBI accession number 7S37_P.

[0717] In some embodiments, the CRISPR gene-editing system targeting the IL18R1 gene is delivered to a mammalian cell via viral vector. In some embodiments, the CRISPR gene-editing system targeting the IL18R1 gene is delivered to a mammalian cell via an AAV vector. In some embodiments, the CRISPR gene-editing system targeting the IL18R1 gene is delivered to a mammalian cell via a lentiviral vector. In some embodiments, the CRISPR gene-editing system targeting the IL18R1 gene is delivered to a mammalian cell via a lipid nanoparticle. In some embodiments, the CRISPR gene-editing system targeting the IL18R1 gene is delivered to a mammalian cell via a virus-like particle. In some embodiments, the CRISPR gene-editing system targeting the IL18R1 gene is delivered to a mammalian cell via a liposome. In some embodiments, the CRISPR gene-editing system targeting the IL18R1 gene is delivered to a mammalian cell via a lipid nanocrystal.

[0718] In some embodiments, the pharmaceutical composition comprises an sgRNA having a crRNA sequence selected from SEQ ID NOs: 1239-1262 and a S. pyogenes Cas9 protein, optionally comprising K848A, K1003A, and R1060A amino acid substitutions or an R691A amino acid substitution, encapsulated in i) a viral vector selected from an AAV vector and a lentiviral vector; ii) a lipid nanoparticle; iii) a virus-like particle; iv) a liposome; or v) a lipid nanocrystal. In some embodiments, the pharmaceutical composition comprises an sgRNA having a crRNA sequence selected from SEQ ID NOs: 1239-1262 and a S. pyogenes Cas9 protein encapsulated in a lipid nanoparticle.

[0719] In various embodiments, the pharmaceutical composition comprising a CRISPR gene-editing system targeting the IL18R1 gene is used in a method of treating a mammal in need thereof. In some embodiments, the method treats a discogenic disease or disorder. In some embodiments, the discogenic disease or disorder is low back pain, neck pain, lumbar pain, degenerative disc disease, discogenic pain annual ligament tear, herniated disc, spinal facet joint arthritis, intervertebral disc disease, spondylosis, painful scoliosis, or spinal stenosis. In some embodiments, the discogenic disease or disorder is discogenic pain.

[0720] In some embodiments, a method is provided for treating a discogenic disease or disorder by administering a therapeutically affective amount of a pharmaceutical composition comprising a CRISPR gene-editing system targeting the IL18R1 gene, as described herein, to a subject in need thereof. In some embodiments, the pharmaceutical composition comprises an LNP encapsuling an sgRNA having a crRNA sequence selected from SEQ ID NOs: 1239-1262 and a S. pyogenes Cas9 protein. In some embodiments, the crRNA sequence is selected from SEQ ID NOs: 1239-1248. In some embodiments, the pharmaceutical composition is administered by intradiscal injection.

[0721] In some embodiments, a method is provided for treating a musculoskeletal disease or disorder by administering a therapeutically affective amount of a pharmaceutical composition comprising a CRISPR gene-editing system targeting the IL18R1 gene, as described herein, to a subject in need thereof. In some embodiments, the musculoskeletal disease or disorder is Arthritis, Infectious Intermittent joint effusion, Ankylosing spondylitis, Arthritis, Osteoarthritis, Spondylarthritis, Plantar fasciitis, Degenerative polyarthritis, Hemophilic arthropathy, Inflammatory myopathy with abundant macrophages, or Polymyositis.

[0722] In yet other embodiments, a method is provided for treating an inflammatory disease or disorder by administering a therapeutically affective amount of a pharmaceutical composition comprising a CRISPR gene-editing system targeting the IL18R1 gene, as described herein, to a subject in need thereof. In some embodiments, the inflammatory disease or disorder is Autoinflammatory Disease (AID), Cryopyrin Associated Periodic syndrome (CAPS), Familial Mediterranean Fever (FMF), TNF-Receptor Associated Periodic Syndrome (TRAPS), Hyper-IgD Syndrome (HIDS), Systemic Lupus Erythematosus (SLE), or Fibrosis (general).

[0723] In certain embodiments, any region of an IL18R1 gene (e.g., 5′ untranslated region [UTR], exon 1, exon 2, exon 3, exon 4, exon 5, exon 6, exon 7, exon 8, exon 9, exon 10, exon 11, exon 12, exon 13, any intervening intronic regions, intron/exon junctions, the 3′ UTR, or polyadenylation signal) is targeted by an RNA-guided nuclease to alter the gene. In some embodiments, the IL18R1 gene targeted by an RNA-guided nuclease is from a mammal. In some embodiments, the IL18R1 gene targeted by an RNA-guided nuclease is from a human (hIL18R1). In some embodiments, the IL18R1 gene targeted by an RNA-guided nuclease is from a dog (cIL18R1). In some embodiments, the IL18R1 gene targeted by an RNA-guided nuclease is from a horse (eIL18R1). In some embodiments, the IL18R1 gene targeted by an RNA-guided nuclease is from a cat (fIL18R1).

### WW. IL18RAP

[0724] In one aspect, methods and pharmaceutical compositions are provided for treating a back or spine condition or disorder by administering a therapeutically effective amount of a CRISPR pharmaceutical composition that targets an IL18RAP gene to a subject in need thereof. In some embodiments, the CRISPR pharmaceutical composition comprises an RNA-guided nuclease and an sgRNA targeting the IL18RAP gene with a crRNA sequence selected from SEQ ID NOs: 1263-1310. In some embodiments, the crRNA sequence is selected from SEQ ID NOs: 1263-1287. In some embodiments, the crRNA sequence is selected from 1263-1272. In some embodiments, the RNA-guided nuclease is a Cas9 protein. In some embodiments, the Cas9 protein is an S. pyogenes Cas9 protein. In some embodiments, the S. pyogenes Cas9 protein comprises K848A, K1003A, and R1060A amino acid substitutions relative to the SpCas9 sequence of NCBI accession number 7S37_P. In some embodiments, the S. pyogenes Cas9 protein comprises an R691A amino acid substitution relative to the SpCas9 sequence of NCBI accession number 7S37_P.

[0725] In some embodiments, the CRISPR gene-editing system targeting the IL18RAP gene is delivered to a mammalian cell via viral vector. In some embodiments, the CRISPR gene-editing system targeting the IL18RAP gene is delivered to a mammalian cell via an AAV vector. In some embodiments, the CRISPR gene-editing system targeting the IL18RAP gene is delivered to a mammalian cell via a lentiviral vector. In some embodiments, the CRISPR gene-editing system targeting the IL18RAP gene is delivered to a mammalian cell via a lipid nanoparticle. In some embodiments, the CRISPR gene-editing system targeting the IL18RAP gene is delivered to a mammalian cell via a virus-like particle. In some embodiments, the CRISPR gene-editing system targeting the IL18RAP gene is delivered to a mammalian cell via a liposome. In some embodiments, the CRISPR gene-editing system targeting the IL18RAP gene is delivered to a mammalian cell via a lipid nanocrystal.

[0726] In some embodiments, the pharmaceutical composition comprises an sgRNA having a crRNA sequence selected from SEQ ID NOs: 1263-1310 and a S. pyogenes Cas9 protein, optionally comprising K848A, K1003A, and R1060A amino acid substitutions or an R691A amino acid substitution, encapsulated in i) a viral vector selected from an AAV vector and a lentiviral vector; ii) a lipid nanoparticle; iii) a virus-like particle; iv) a liposome; or v) a lipid nanocrystal. In some embodiments, the pharmaceutical composition comprises an sgRNA having a crRNA sequence selected from SEQ ID NOs: 1263-1310 and a S. pyogenes Cas9 protein encapsulated in a lipid nanoparticle.

[0727] In various embodiments, the pharmaceutical composition comprising a CRISPR gene-editing system targeting the IL18RAP gene is used in a method of treating a mammal in need thereof. In some embodiments, the method treats a discogenic disease or disorder. In some embodiments, the discogenic disease or disorder is low back pain, neck pain, lumbar pain, degenerative disc disease, discogenic pain annual ligament tear, herniated disc, spinal facet joint arthritis, intervertebral disc disease, spondylosis, painful scoliosis, or spinal stenosis. In some embodiments, the discogenic disease or disorder is discogenic pain.

[0728] In some embodiments, a method is provided for treating a discogenic disease or disorder by administering a therapeutically affective amount of a pharmaceutical composition comprising a CRISPR gene-editing system targeting the IL18RAP gene, as described herein, to a subject in need thereof. In some embodiments, the pharmaceutical composition comprises an LNP encapsuling an sgRNA having a crRNA sequence selected from SEQ ID NOs: 1263-1310 and a S. pyogenes Cas9 protein. In some embodiments, the crRNA sequence is selected from SEQ ID NOs: 1263-1287. In some embodiments, the crRNA sequence is selected from SEQ ID NOs: 1263-1272. In some embodiments, the pharmaceutical composition is administered by intradiscal injection.

[0729] In some embodiments, a method is provided for treating a musculoskeletal disease or disorder by administering a therapeutically affective amount of a pharmaceutical composition comprising a CRISPR gene-editing system targeting the IL18RAP gene, as described herein, to a subject in need thereof. In some embodiments, the musculoskeletal disease or disorder is Arthritis, Infectious Intermittent joint effusion, Ankylosing spondylitis, Arthritis, Osteoarthritis, Spondylarthritis, Plantar fasciitis, Degenerative polyarthritis, Hemophilic arthropathy, Inflammatory myopathy with abundant macrophages, or Polymyositis.

[0730] In yet other embodiments, a method is provided for treating an inflammatory disease or disorder by administering a therapeutically affective amount of a pharmaceutical composition comprising a CRISPR gene-editing system targeting the IL18RAP gene, as described herein, to a subject in need thereof. In some embodiments, the inflammatory disease or disorder is Autoinflammatory Disease (AID), Cryopyrin Associated Periodic syndrome (CAPS), Familial Mediterranean Fever (FMF), TNF-Receptor Associated Periodic Syndrome (TRAPS), Hyper-IgD Syndrome (HIDS), Systemic Lupus Erythematosus (SLE), or Fibrosis (general).

[0731] In certain embodiments, any region of an IL18RAP gene (e.g., 5′ untranslated region [UTR], exon 1, exon 2, exon 3, exon 4, exon 5, exon 6, exon 7, exon 8, exon 9, exon 10, exon 11, exon 12, exon 13, exon 14, exon 15, any intervening intronic regions, intron/exon junctions, the 3′ UTR, or polyadenylation signal) is targeted by an RNA-guided nuclease to alter the gene. In some embodiments, the IL18RAP gene targeted by an RNA-guided nuclease is from a mammal. In some embodiments, the IL18RAP gene targeted by an RNA-guided nuclease is from a human (hIL18RAP). In some embodiments, the IL18RAP gene targeted by an RNA-guided nuclease is from a dog (cIL18RAP). In some embodiments, the IL18RAP gene targeted by an RNA-guided nuclease is from a horse (eIL18RAP). In some embodiments, the IL18RAP gene targeted by an RNA-guided nuclease is from a cat (fIL18RAP).

### XX. SCN1A

[0732] In one aspect, methods and pharmaceutical compositions are provided for treating a back or spine condition or disorder by administering a therapeutically effective amount of a CRISPR pharmaceutical composition that targets an SCN1A gene to a subject in need thereof. In some embodiments, the CRISPR pharmaceutical composition comprises an RNA-guided nuclease and an sgRNA targeting the SCN1A gene with a crRNA sequence selected from SEQ ID NOs: 1860-1907. In some embodiments, the crRNA sequence is selected from SEQ ID NOs: 1860-1884. In some embodiments, the crRNA sequence is selected from 1860-1869. In some embodiments, the RNA-guided nuclease is a Cas9 protein. In some embodiments, the Cas9 protein is an S. pyogenes Cas9 protein. In some embodiments, the S. pyogenes Cas9 protein comprises K848A, K1003A, and R1060A amino acid substitutions relative to the SpCas9 sequence of NCBI accession number 7S37_P. In some embodiments, the S. pyogenes Cas9 protein comprises an R691A amino acid substitution relative to the SpCas9 sequence of NCBI accession number 7S37_P.

[0733] In some embodiments, the CRISPR gene-editing system targeting the SCN1A gene is delivered to a mammalian cell via viral vector. In some embodiments, the CRISPR gene-editing system targeting the SCN1A gene is delivered to a mammalian cell via an AAV vector. In some embodiments, the CRISPR gene-editing system targeting the SCN1A gene is delivered to a mammalian cell via a lentiviral vector. In some embodiments, the CRISPR gene-editing system targeting the SCN1A gene is delivered to a mammalian cell via a lipid nanoparticle. In some embodiments, the CRISPR gene-editing system targeting the SCN1A gene is delivered to a mammalian cell via a virus-like particle. In some embodiments, the CRISPR gene-editing system targeting the SCN1A gene is delivered to a mammalian cell via a liposome. In some embodiments, the CRISPR gene-editing system targeting the SCN1A gene is delivered to a mammalian cell via a lipid nanocrystal.

[0734] In some embodiments, the pharmaceutical composition comprises an sgRNA having a crRNA sequence selected from SEQ ID NOs: 1860-1907 and a S. pyogenes Cas9 protein, optionally comprising K848A, K1003A, and R1060A amino acid substitutions or an R691A amino acid substitution, encapsulated in i) a viral vector selected from an AAV vector and a lentiviral vector; ii) a lipid nanoparticle; iii) a virus-like particle; iv) a liposome; or v) a lipid nanocrystal. In some embodiments, the pharmaceutical composition comprises an sgRNA having a crRNA sequence selected from SEQ ID NOs: 1860-1907 and a S. pyogenes Cas9 protein encapsulated in a lipid nanoparticle.

[0735] In various embodiments, the pharmaceutical composition comprising a CRISPR gene-editing system targeting the SCN1A gene is used in a method of treating a mammal in need thereof. In some embodiments, the method treats a discogenic disease or disorder. In some embodiments, the discogenic disease or disorder is low back pain, neck pain, lumbar pain, degenerative disc disease, discogenic pain annual ligament tear, herniated disc, spinal facet joint arthritis, intervertebral disc disease, spondylosis, painful scoliosis, or spinal stenosis. In some embodiments, the discogenic disease or disorder is discogenic pain.

[0736] In some embodiments, a method is provided for treating a discogenic disease or disorder by administering a therapeutically affective amount of a pharmaceutical composition comprising a CRISPR gene-editing system targeting the SCN1A gene, as described herein, to a subject in need thereof. In some embodiments, the pharmaceutical composition comprises an LNP encapsuling an sgRNA having a crRNA sequence selected from SEQ ID NOs: 1860-1907 and a S. pyogenes Cas9 protein. In some embodiments, the crRNA sequence is selected from SEQ ID NOs: 1860-1884. In some embodiments, the crRNA sequence is selected from SEQ ID NOs: 1860-1869. In some embodiments, the pharmaceutical composition is administered by intradiscal injection.

[0737] In some embodiments, a method is provided for treating a musculoskeletal disease or disorder by administering a therapeutically affective amount of a pharmaceutical composition comprising a CRISPR gene-editing system targeting the SCN1A gene, as described herein, to a subject in need thereof. In some embodiments, the musculoskeletal disease or disorder is Arthritis, Infectious Intermittent joint effusion, Ankylosing spondylitis, Arthritis, Osteoarthritis, Spondylarthritis, Plantar fasciitis, Degenerative polyarthritis, Hemophilic arthropathy, Inflammatory myopathy with abundant macrophages, or Polymyositis.

[0738] In yet other embodiments, a method is provided for treating an inflammatory disease or disorder by administering a therapeutically affective amount of a pharmaceutical composition comprising a CRISPR gene-editing system targeting the SCN1A gene, as described herein, to a subject in need thereof. In some embodiments, the inflammatory disease or disorder is Autoinflammatory Disease (AID), Cryopyrin Associated Periodic syndrome (CAPS), Familial Mediterranean Fever (FMF), TNF-Receptor Associated Periodic Syndrome (TRAPS), Hyper-IgD Syndrome (HIDS), Systemic Lupus Erythematosus (SLE), or Fibrosis (general).

[0739] In certain embodiments, any region of an SCN1A gene (e.g., 5′ untranslated region [UTR], exon 1, exon 2, exon 3, exon 4, exon 5, exon 6, exon 7, exon 8, exon 9, exon 10, exon 11, exon 12, exon 13, exon 14, exon 15, exon 16, exon 17, exon 18, exon 19, exon 20, exon 21, exon 22, exon 23, exon 24, exon 25, exon 26, exon 27, exon 28, exon 29, exon 30, any intervening intronic regions, intron/exon junctions, the 3′ UTR, or polyadenylation signal) is targeted by an RNA-guided nuclease to alter the gene. In some embodiments, the SCN1A gene targeted by an RNA-guided nuclease is from a mammal. In some embodiments, the SCN1A gene targeted by an RNA-guided nuclease is from a human (hSCN1A). In some embodiments, the SCN1A gene targeted by an RNA-guided nuclease is from a dog (cSCN1A). In some embodiments, the SCN1A gene targeted by an RNA-guided nuclease is from a horse (eSCN1A). In some embodiments, the SCN1A gene targeted by an RNA-guided nuclease is from a cat (fSCN1A).

### YY. SCN2A

[0740] In one aspect, methods and pharmaceutical compositions are provided for treating a back or spine condition or disorder by administering a therapeutically effective amount of a CRISPR pharmaceutical composition that targets an SCN2A gene to a subject in need thereof. In some embodiments, the CRISPR pharmaceutical composition comprises an RNA-guided nuclease and an sgRNA targeting the SCN2A gene with a crRNA sequence selected from SEQ ID NOs: 1908-1955. In some embodiments, the crRNA sequence is selected from SEQ ID NOs: 1908-1932. In some embodiments, the crRNA sequence is selected from 1908-1917. In some embodiments, the RNA-guided nuclease is a Cas9 protein. In some embodiments, the Cas9 protein is an S. pyogenes Cas9 protein. In some embodiments, the S. pyogenes Cas9 protein comprises K848A, K1003A, and R1060A amino acid substitutions relative to the SpCas9 sequence of NCBI accession number 7S37_P. In some embodiments, the S. pyogenes Cas9 protein comprises an R691A amino acid substitution relative to the SpCas9 sequence of NCBI accession number 7S37_P.

[0741] In some embodiments, the CRISPR gene-editing system targeting the SCN2A gene is delivered to a mammalian cell via viral vector. In some embodiments, the CRISPR gene-editing system targeting the SCN2A gene is delivered to a mammalian cell via an AAV vector. In some embodiments, the CRISPR gene-editing system targeting the SCN2A gene is delivered to a mammalian cell via a lentiviral vector. In some embodiments, the CRISPR gene-editing system targeting the SCN2A gene is delivered to a mammalian cell via a lipid nanoparticle. In some embodiments, the CRISPR gene-editing system targeting the SCN2A gene is delivered to a mammalian cell via a virus-like particle. In some embodiments, the CRISPR gene-editing system targeting the SCN2A gene is delivered to a mammalian cell via a liposome. In some embodiments, the CRISPR gene-editing system targeting the SCN2A gene is delivered to a mammalian cell via a lipid nanocrystal.

[0742] In some embodiments, the pharmaceutical composition comprises an sgRNA having a crRNA sequence selected from SEQ ID NOs: 1908-1955 and a S. pyogenes Cas9 protein, optionally comprising K848A, K1003A, and R1060A amino acid substitutions or an R691A amino acid substitution, encapsulated in i) a viral vector selected from an AAV vector and a lentiviral vector; ii) a lipid nanoparticle; iii) a virus-like particle; iv) a liposome; or v) a lipid nanocrystal. In some embodiments, the pharmaceutical composition comprises an sgRNA having a crRNA sequence selected from SEQ ID NOs: 1908-1955 and a S. pyogenes Cas9 protein encapsulated in a lipid nanoparticle.

[0743] In various embodiments, the pharmaceutical composition comprising a CRISPR gene-editing system targeting the SCN2A gene is used in a method of treating a mammal in need thereof. In some embodiments, the method treats a discogenic disease or disorder. In some embodiments, the discogenic disease or disorder is low back pain, neck pain, lumbar pain, degenerative disc disease, discogenic pain annual ligament tear, herniated disc, spinal facet joint arthritis, intervertebral disc disease, spondylosis, painful scoliosis, or spinal stenosis. In some embodiments, the discogenic disease or disorder is discogenic pain.

[0744] In some embodiments, a method is provided for treating a discogenic disease or disorder by administering a therapeutically affective amount of a pharmaceutical composition comprising a CRISPR gene-editing system targeting the SCN2A gene, as described herein, to a subject in need thereof. In some embodiments, the pharmaceutical composition comprises an LNP encapsuling an sgRNA having a crRNA sequence selected from SEQ ID NOs: 1908-1955 and a S. pyogenes Cas9 protein. In some embodiments, the crRNA sequence is selected from SEQ ID NOs: 1908-1932. In some embodiments, the crRNA sequence is selected from SEQ ID NOs: 1908-1917. In some embodiments, the pharmaceutical composition is administered by intradiscal injection.

[0745] In some embodiments, a method is provided for treating a musculoskeletal disease or disorder by administering a therapeutically affective amount of a pharmaceutical composition comprising a CRISPR gene-editing system targeting the SCN2A gene, as described herein, to a subject in need thereof. In some embodiments, the musculoskeletal disease or disorder is Arthritis, Infectious Intermittent joint effusion, Ankylosing spondylitis, Arthritis, Osteoarthritis, Spondylarthritis, Plantar fasciitis, Degenerative polyarthritis, Hemophilic arthropathy, Inflammatory myopathy with abundant macrophages, or Polymyositis.

[0746] In yet other embodiments, a method is provided for treating an inflammatory disease or disorder by administering a therapeutically affective amount of a pharmaceutical composition comprising a CRISPR gene-editing system targeting the SCN2A gene, as described herein, to a subject in need thereof. In some embodiments, the inflammatory disease or disorder is Autoinflammatory Disease (AID), Cryopyrin Associated Periodic syndrome (CAPS), Familial Mediterranean Fever (FMF), TNF-Receptor Associated Periodic Syndrome (TRAPS), Hyper-IgD Syndrome (HIDS), Systemic Lupus Erythematosus (SLE), or Fibrosis (general).

[0747] In certain embodiments, any region of an SCN2A gene (e.g., 5′ untranslated region [UTR], exon 1, exon 2, exon 3, exon 4, exon 5, exon 6, exon 7, exon 8, exon 9, exon 10, exon 11, exon 12, exon 13, exon 14, exon 15, exon 16, exon 17, exon 18, exon 19, exon 20, exon 21, exon 22, exon 23, exon 24, exon 25, exon 26, exon 27, exon 28, exon 29, exon 30, any intervening intronic regions, intron/exon junctions, the 3′ UTR, or polyadenylation signal) is targeted by an RNA-guided nuclease to alter the gene. In some embodiments, the SCN2A gene targeted by an RNA-guided nuclease is from a mammal. In some embodiments, the SCN2A gene targeted by an RNA-guided nuclease is from a human (hSCN2A). In some embodiments, the SCN2A gene targeted by an RNA-guided nuclease is from a dog (cSCN2A). In some embodiments, the SCN2A gene targeted by an RNA-guided nuclease is from a horse (eSCN2A). In some embodiments, the SCN2A gene targeted by an RNA-guided nuclease is from a cat (fSCN2A).

### ZZ. SCN3A

[0748] In one aspect, methods and pharmaceutical compositions are provided for treating a back or spine condition or disorder by administering a therapeutically effective amount of a CRISPR pharmaceutical composition that targets an SCN3A gene to a subject in need thereof. In some embodiments, the CRISPR pharmaceutical composition comprises an RNA-guided nuclease and an sgRNA targeting the SCN3A gene with a crRNA sequence selected from SEQ ID NOs: 1956-2003. In some embodiments, the crRNA sequence is selected from SEQ ID NOs: 1956-1980. In some embodiments, the crRNA sequence is selected from 1956-1965. In some embodiments, the RNA-guided nuclease is a Cas9 protein. In some embodiments, the Cas9 protein is an S. pyogenes Cas9 protein. In some embodiments, the S. pyogenes Cas9 protein comprises K848A, K1003A, and R1060A amino acid substitutions relative to the SpCas9 sequence of NCBI accession number 7S37_P. In some embodiments, the S. pyogenes Cas9 protein comprises an R691A amino acid substitution relative to the SpCas9 sequence of NCBI accession number 7S37_P.

[0749] In some embodiments, the CRISPR gene-editing system targeting the SCN3A gene is delivered to a mammalian cell via viral vector. In some embodiments, the CRISPR gene-editing system targeting the SCN3A gene is delivered to a mammalian cell via an AAV vector. In some embodiments, the CRISPR gene-editing system targeting the SCN3A gene is delivered to a mammalian cell via a lentiviral vector. In some embodiments, the CRISPR gene-editing system targeting the SCN3A gene is delivered to a mammalian cell via a lipid nanoparticle. In some embodiments, the CRISPR gene-editing system targeting the SCN3A gene is delivered to a mammalian cell via a virus-like particle. In some embodiments, the CRISPR gene-editing system targeting the SCN3A gene is delivered to a mammalian cell via a liposome. In some embodiments, the CRISPR gene-editing system targeting the SCN3A gene is delivered to a mammalian cell via a lipid nanocrystal.

[0750] In some embodiments, the pharmaceutical composition comprises an sgRNA having a crRNA sequence selected from SEQ ID NOs: 1956-2003 and a S. pyogenes Cas9 protein, optionally comprising K848A, K1003A, and R1060A amino acid substitutions or an R691A amino acid substitution, encapsulated in i) a viral vector selected from an AAV vector and a lentiviral vector; ii) a lipid nanoparticle; iii) a virus-like particle; iv) a liposome; or v) a lipid nanocrystal. In some embodiments, the pharmaceutical composition comprises an sgRNA having a crRNA sequence selected from SEQ ID NOs: 1956-2003 and a S. pyogenes Cas9 protein encapsulated in a lipid nanoparticle.

[0751] In various embodiments, the pharmaceutical composition comprising a CRISPR gene-editing system targeting the SCN3A gene is used in a method of treating a mammal in need thereof. In some embodiments, the method treats a discogenic disease or disorder. In some embodiments, the discogenic disease or disorder is low back pain, neck pain, lumbar pain, degenerative disc disease, discogenic pain annual ligament tear, herniated disc, spinal facet joint arthritis, intervertebral disc disease, spondylosis, painful scoliosis, or spinal stenosis. In some embodiments, the discogenic disease or disorder is discogenic pain.

[0752] In some embodiments, a method is provided for treating a discogenic disease or disorder by administering a therapeutically affective amount of a pharmaceutical composition comprising a CRISPR gene-editing system targeting the SCN3A gene, as described herein, to a subject in need thereof. In some embodiments, the pharmaceutical composition comprises an LNP encapsuling an sgRNA having a crRNA sequence selected from SEQ ID NOs: 1956-2003 and a S. pyogenes Cas9 protein. In some embodiments, the crRNA sequence is selected from SEQ ID NOs: 1956-1980. In some embodiments, the crRNA sequence is selected from SEQ ID NOs: 1956-1965. In some embodiments, the pharmaceutical composition is administered by intradiscal injection.

[0753] In some embodiments, a method is provided for treating a musculoskeletal disease or disorder by administering a therapeutically affective amount of a pharmaceutical composition comprising a CRISPR gene-editing system targeting the SCN3A gene, as described herein, to a subject in need thereof. In some embodiments, the musculoskeletal disease or disorder is Arthritis. Infectious Intermittent joint effusion, Ankylosing spondylitis, Arthritis, Osteoarthritis, Spondylarthritis, Plantar fasciitis, Degenerative polyarthritis, Hemophilic arthropathy, Inflammatory myopathy with abundant macrophages, or Polymyositis.

[0754] In yet other embodiments, a method is provided for treating an inflammatory disease or disorder by administering a therapeutically affective amount of a pharmaceutical composition comprising a CRISPR gene-editing system targeting the SCN3A gene, as described herein, to a subject in need thereof. In some embodiments, the inflammatory disease or disorder is Autoinflammatory Disease (AID), Cryopyrin Associated Periodic syndrome (CAPS), Familial Mediterranean Fever (FMF), TNF-Receptor Associated Periodic Syndrome (TRAPS), Hyper-IgD Syndrome (HIDS), Systemic Lupus Erythematosus (SLE), or Fibrosis (general).

[0755] In certain embodiments, any region of an SCN3A gene (e.g., 5′ untranslated region [UTR], exon 1, exon 2, exon 3, exon 4, exon 5, exon 6, exon 7, exon 8, exon 9, exon 10, exon 11, exon 12, exon 13, exon 14, exon 15, exon 16, exon 17, exon 18, exon 19, exon 20, exon 21, exon 22, exon 23, exon 24, exon 25, exon 26, exon 27, exon 28, exon 29, exon 30, exon 31, exon 32, any intervening intronic regions, intron/exon junctions, the 3′ UTR, or polyadenylation signal) is targeted by an RNA-guided nuclease to alter the gene. In some embodiments, the SCN3A gene targeted by an RNA-guided nuclease is from a mammal. In some embodiments, the SCN3A gene targeted by an RNA-guided nuclease is from a human (hSCN3A). In some embodiments, the SCN3A gene targeted by an RNA-guided nuclease is from a dog (cSCN3A). In some embodiments, the SCN3A gene targeted by an RNA-guided nuclease is from a horse (eSCN3A). In some embodiments, the SCN3A gene targeted by an RNA-guided nuclease is from a cat (fSCN3A).

### AAA. SCN4A

[0756] In one aspect, methods and pharmaceutical compositions are provided for treating a back or spine condition or disorder by administering a therapeutically effective amount of a CRISPR pharmaceutical composition that targets an SCN4A gene to a subject in need thereof. In some embodiments, the CRISPR pharmaceutical composition comprises an RNA-guided nuclease and an sgRNA targeting the SCN4A gene with a crRNA sequence selected from SEQ ID NOs: 2004-2051. In some embodiments, the crRNA sequence is selected from SEQ ID NOs: 2004-2028. In some embodiments, the crRNA sequence is selected from 2004-2013. In some embodiments, the RNA-guided nuclease is a Cas9 protein. In some embodiments, the Cas9 protein is an S. pyogenes Cas9 protein. In some embodiments, the S. pyogenes Cas9 protein comprises K848A, K1003A, and R1060A amino acid substitutions relative to the SpCas9 sequence of NCBI accession number 7S37_P. In some embodiments, the S. pyogenes Cas9 protein comprises an R691A amino acid substitution relative to the SpCas9 sequence of NCBI accession number 7S37_P.

[0757] In some embodiments, the CRISPR gene-editing system targeting the SCN4A gene is delivered to a mammalian cell via viral vector. In some embodiments, the CRISPR gene-editing system targeting the SCN4A gene is delivered to a mammalian cell via an AAV vector. In some embodiments, the CRISPR gene-editing system targeting the SCN4A gene is delivered to a mammalian cell via a lentiviral vector. In some embodiments, the CRISPR gene-editing system targeting the SCN4A gene is delivered to a mammalian cell via a lipid nanoparticle. In some embodiments, the CRISPR gene-editing system targeting the SCN4A gene is delivered to a mammalian cell via a virus-like particle. In some embodiments, the CRISPR gene-editing system targeting the SCN4A gene is delivered to a mammalian cell via a liposome. In some embodiments, the CRISPR gene-editing system targeting the SCN4A gene is delivered to a mammalian cell via a lipid nanocrystal.

[0758] In some embodiments, the pharmaceutical composition comprises an sgRNA having a crRNA sequence selected from SEQ ID NOs: 2004-2051 and a S. pyogenes Cas9 protein, optionally comprising K848A, K1003A, and R1060A amino acid substitutions or an R691A amino acid substitution, encapsulated in i) a viral vector selected from an AAV vector and a lentiviral vector; ii) a lipid nanoparticle; iii) a virus-like particle; iv) a liposome; or v) a lipid nanocrystal. In some embodiments, the pharmaceutical composition comprises an sgRNA having a crRNA sequence selected from SEQ ID NOs: 2004-2051 and a S. pyogenes Cas9 protein encapsulated in a lipid nanoparticle.

[0759] In various embodiments, the pharmaceutical composition comprising a CRISPR gene-editing system targeting the SCN4A gene is used in a method of treating a mammal in need thereof. In some embodiments, the method treats a discogenic disease or disorder. In some embodiments, the discogenic disease or disorder is low back pain, neck pain, lumbar pain, degenerative disc disease, discogenic pain annual ligament tear, herniated disc, spinal facet joint arthritis, intervertebral disc disease, spondylosis, painful scoliosis, or spinal stenosis. In some embodiments, the discogenic disease or disorder is discogenic pain.

[0760] In some embodiments, a method is provided for treating a discogenic disease or disorder by administering a therapeutically affective amount of a pharmaceutical composition comprising a CRISPR gene-editing system targeting the SCN4A gene, as described herein, to a subject in need thereof. In some embodiments, the pharmaceutical composition comprises an LNP encapsuling an sgRNA having a crRNA sequence selected from SEQ ID NOs: 2004-2051 and a S. pyogenes Cas9 protein. In some embodiments, the crRNA sequence is selected from SEQ ID NOs: 2004-2028. In some embodiments, the crRNA sequence is selected from SEQ ID NOs: 2004-2013. In some embodiments, the pharmaceutical composition is administered by intradiscal injection.

[0761] In some embodiments, a method is provided for treating a musculoskeletal disease or disorder by administering a therapeutically affective amount of a pharmaceutical composition comprising a CRISPR gene-editing system targeting the SCN4A gene, as described herein, to a subject in need thereof. In some embodiments, the musculoskeletal disease or disorder is Arthritis, Infectious Intermittent joint effusion, Ankylosing spondylitis, Arthritis, Osteoarthritis, Spondylarthritis, Plantar fasciitis, Degenerative polyarthritis, Hemophilic arthropathy, Inflammatory myopathy with abundant macrophages, or Polymyositis.

[0762] In yet other embodiments, a method is provided for treating an inflammatory disease or disorder by administering a therapeutically affective amount of a pharmaceutical composition comprising a CRISPR gene-editing system targeting the SCN4A gene, as described herein, to a subject in need thereof. In some embodiments, the inflammatory disease or disorder is Autoinflammatory Disease (AID), Cryopyrin Associated Periodic syndrome (CAPS), Familial Mediterranean Fever (FMF), TNF-Receptor Associated Periodic Syndrome (TRAPS), Hyper-IgD Syndrome (HIDS), Systemic Lupus Erythematosus (SLE), or Fibrosis (general).

[0763] In certain embodiments, any region of an SCN4A gene (e.g., 5′ untranslated region [UTR], exon 1, exon 2, exon 3, exon 4, exon 5, exon 6, exon 7, exon 8, exon 9, exon 10, exon 11, exon 12, exon 13, exon 14, exon 15, exon 16, exon 17, exon 18, exon 19, exon 20, exon 21, exon 22, exon 23, exon 24, exon 25, exon 26, exon 27, exon 28, exon 29, exon 30, any intervening intronic regions, intron/exon junctions, the 3′ UTR, or polyadenylation signal) is targeted by an RNA-guided nuclease to alter the gene. In some embodiments, the SCN4A gene targeted by an RNA-guided nuclease is from a mammal. In some embodiments, the SCN4A gene targeted by an RNA-guided nuclease is from a human (hSCN4A). In some embodiments, the SCN4A gene targeted by an RNA-guided nuclease is from a dog (cSCN4A). In some embodiments, the SCN4A gene targeted by an RNA-guided nuclease is from a horse (eSCN4A). In some embodiments, the SCN4A gene targeted by an RNA-guided nuclease is from a cat (fSCN4A).

### BBB. SCN5A

[0764] In one aspect, methods and pharmaceutical compositions are provided for treating a back or spine condition or disorder by administering a therapeutically effective amount of a CRISPR pharmaceutical composition that targets an SCN5A gene to a subject in need thereof. In some embodiments, the CRISPR pharmaceutical composition comprises an RNA-guided nuclease and an sgRNA targeting the SCN5A gene with a crRNA sequence selected from SEQ ID NOs: 2052-2099. In some embodiments, the crRNA sequence is selected from SEQ ID NOs: 2052-2076. In some embodiments, the crRNA sequence is selected from 2052-2061. In some embodiments, the RNA-guided nuclease is a Cas9 protein. In some embodiments, the Cas9 protein is an S. pyogenes Cas9 protein. In some embodiments, the S. pyogenes Cas9 protein comprises K848A, K1003A, and R1060A amino acid substitutions relative to the SpCas9 sequence of NCBI accession number 7S37_P. In some embodiments, the S. pyogenes Cas9 protein comprises an R691A amino acid substitution relative to the SpCas9 sequence of NCBI accession number 7S37_P.

[0765] In some embodiments, the CRISPR gene-editing system targeting the SCN5A gene is delivered to a mammalian cell via viral vector. In some embodiments, the CRISPR gene-editing system targeting the SCN5A gene is delivered to a mammalian cell via an AAV vector. In some embodiments, the CRISPR gene-editing system targeting the SCN5A gene is delivered to a mammalian cell via a lentiviral vector. In some embodiments, the CRISPR gene-editing system targeting the SCN5A gene is delivered to a mammalian cell via a lipid nanoparticle. In some embodiments, the CRISPR gene-editing system targeting the SCN5A gene is delivered to a mammalian cell via a virus-like particle. In some embodiments, the CRISPR gene-editing system targeting the SCN5A gene is delivered to a mammalian cell via a liposome. In some embodiments, the CRISPR gene-editing system targeting the SCN5A gene is delivered to a mammalian cell via a lipid nanocrystal.

[0766] In some embodiments, the pharmaceutical composition comprises an sgRNA having a crRNA sequence selected from SEQ ID NOs: 2052-2099 and a S. pyogenes Cas9 protein, optionally comprising K848A, K1003A, and R1060A amino acid substitutions or an R691A amino acid substitution, encapsulated in i) a viral vector selected from an AAV vector and a lentiviral vector; ii) a lipid nanoparticle; iii) a virus-like particle; iv) a liposome; or v) a lipid nanocrystal. In some embodiments, the pharmaceutical composition comprises an sgRNA having a crRNA sequence selected from SEQ ID NOs: 2052-2099 and a S. pyogenes Cas9 protein encapsulated in a lipid nanoparticle.

[0767] In various embodiments, the pharmaceutical composition comprising a CRISPR gene-editing system targeting the SCN5A gene is used in a method of treating a mammal in need thereof. In some embodiments, the method treats a discogenic disease or disorder. In some embodiments, the discogenic disease or disorder is low back pain, neck pain, lumbar pain, degenerative disc disease, discogenic pain annual ligament tear, herniated disc, spinal facet joint arthritis, intervertebral disc disease, spondylosis, painful scoliosis, or spinal stenosis. In some embodiments, the discogenic disease or disorder is discogenic pain.

[0768] In some embodiments, a method is provided for treating a discogenic disease or disorder by administering a therapeutically affective amount of a pharmaceutical composition comprising a CRISPR gene-editing system targeting the SCN5A gene, as described herein, to a subject in need thereof. In some embodiments, the pharmaceutical composition comprises an LNP encapsuling an sgRNA having a crRNA sequence selected from SEQ ID NOs: 2052-2099 and a S. pyogenes Cas9 protein. In some embodiments, the crRNA sequence is selected from SEQ ID NOs: 2052-2076. In some embodiments, the crRNA sequence is selected from SEQ ID NOs: 2052-2061. In some embodiments, the pharmaceutical composition is administered by intradiscal injection.

[0769] In some embodiments, a method is provided for treating a musculoskeletal disease or disorder by administering a therapeutically affective amount of a pharmaceutical composition comprising a CRISPR gene-editing system targeting the SCN5A gene, as described herein, to a subject in need thereof. In some embodiments, the musculoskeletal disease or disorder is Arthritis, Infectious Intermittent joint effusion, Ankylosing spondylitis, Arthritis, Osteoarthritis, Spondylarthritis, Plantar fasciitis, Degenerative polyarthritis, Hemophilic arthropathy, Inflammatory myopathy with abundant macrophages, or Polymyositis.

[0770] In yet other embodiments, a method is provided for treating an inflammatory disease or disorder by administering a therapeutically affective amount of a pharmaceutical composition comprising a CRISPR gene-editing system targeting the SCN5A gene, as described herein, to a subject in need thereof. In some embodiments, the inflammatory disease or disorder is Autoinflammatory Disease (AID), Cryopyrin Associated Periodic syndrome (CAPS), Familial Mediterranean Fever (FMF), TNF-Receptor Associated Periodic Syndrome (TRAPS), Hyper-IgD Syndrome (HIDS), Systemic Lupus Erythematosus (SLE), or Fibrosis (general).

[0771] In certain embodiments, any region of an SCN5A gene (e.g., 5′ untranslated region [UTR], exon 1, exon 2, exon 3, exon 4, exon 5, exon 6, exon 7, exon 8, exon 9, exon 10, exon 11, exon 12, exon 13, exon 14, exon 15, exon 16, exon 17, exon 18, exon 19, exon 20, exon 21, exon 22, exon 23, exon 24, exon 25, exon 26, exon 27, exon 28, exon 29, exon 30, exon 31, any intervening intronic regions, intron/exon junctions, the 3′ UTR, or polyadenylation signal) is targeted by an RNA-guided nuclease to alter the gene. In some embodiments, the SCN5A gene targeted by an RNA-guided nuclease is from a mammal. In some embodiments, the SCN5A gene targeted by an RNA-guided nuclease is from a human (hSCN5A). In some embodiments, the SCN5A gene targeted by an RNA-guided nuclease is from a dog (cSCN5A). In some embodiments, the SCN5A gene targeted by an RNA-guided nuclease is from a horse (eSCN5A). In some embodiments, the SCN5A gene targeted by an RNA-guided nuclease is from a cat (fSCN5A).

### CCC. SCN8A

[0772] In one aspect, methods and pharmaceutical compositions are provided for treating a back or spine condition or disorder by administering a therapeutically effective amount of a CRISPR pharmaceutical composition that targets an SCN8A gene to a subject in need thereof. In some embodiments, the CRISPR pharmaceutical composition comprises an RNA-guided nuclease and an sgRNA targeting the SCN8A gene with a crRNA sequence selected from SEQ ID NOs: 2100-2147. In some embodiments, the crRNA sequence is selected from SEQ ID NOs: 2100-2124. In some embodiments, the crRNA sequence is selected from 2100-2109. In some embodiments, the RNA-guided nuclease is a Cas9 protein. In some embodiments, the Cas9 protein is an S. pyogenes Cas9 protein. In some embodiments, the S. pyogenes Cas9 protein comprises K848A, K1003A, and R1060A amino acid substitutions relative to the SpCas9 sequence of NCBI accession number 7S37_P. In some embodiments, the S. pyogenes Cas9 protein comprises an R691A amino acid substitution relative to the SpCas9 sequence of NCBI accession number 7S37_P.

[0773] In some embodiments, the CRISPR gene-editing system targeting the SCN8A gene is delivered to a mammalian cell via viral vector. In some embodiments, the CRISPR gene-editing system targeting the SCN8A gene is delivered to a mammalian cell via an AAV vector. In some embodiments, the CRISPR gene-editing system targeting the SCN8A gene is delivered to a mammalian cell via a lentiviral vector. In some embodiments, the CRISPR gene-editing system targeting the SCN8A gene is delivered to a mammalian cell via a lipid nanoparticle. In some embodiments, the CRISPR gene-editing system targeting the SCN8A gene is delivered to a mammalian cell via a virus-like particle. In some embodiments, the CRISPR gene-editing system targeting the SCN8A gene is delivered to a mammalian cell via a liposome. In some embodiments, the CRISPR gene-editing system targeting the SCN8A gene is delivered to a mammalian cell via a lipid nanocrystal.

[0774] In some embodiments, the pharmaceutical composition comprises an sgRNA having a crRNA sequence selected from SEQ ID NOs: 2100-2147 and a S. pyogenes Cas9 protein, optionally comprising K848A, K1003A, and R1060A amino acid substitutions or an R691A amino acid substitution, encapsulated in i) a viral vector selected from an AAV vector and a lentiviral vector; ii) a lipid nanoparticle; iii) a virus-like particle; iv) a liposome; or v) a lipid nanocrystal. In some embodiments, the pharmaceutical composition comprises an sgRNA having a crRNA sequence selected from SEQ ID NOs: 2100-2147 and a S. pyogenes Cas9 protein encapsulated in a lipid nanoparticle.

[0775] In various embodiments, the pharmaceutical composition comprising a CRISPR gene-editing system targeting the SCN8A gene is used in a method of treating a mammal in need thereof. In some embodiments, the method treats a discogenic disease or disorder. In some embodiments, the discogenic disease or disorder is low back pain, neck pain, lumbar pain, degenerative disc disease, discogenic pain annual ligament tear, herniated disc, spinal facet joint arthritis, intervertebral disc disease, spondylosis, painful scoliosis, or spinal stenosis. In some embodiments, the discogenic disease or disorder is discogenic pain.

[0776] In some embodiments, a method is provided for treating a discogenic disease or disorder by administering a therapeutically affective amount of a pharmaceutical composition comprising a CRISPR gene-editing system targeting the SCN8A gene, as described herein, to a subject in need thereof. In some embodiments, the pharmaceutical composition comprises an LNP encapsuling an sgRNA having a crRNA sequence selected from SEQ ID NOs: 2100-2147 and a S. pyogenes Cas9 protein. In some embodiments, the crRNA sequence is selected from SEQ ID NOs: 2100-2124. In some embodiments, the crRNA sequence is selected from SEQ ID NOs: 2100-2109. In some embodiments, the pharmaceutical composition is administered by intradiscal injection.

[0777] In some embodiments, a method is provided for treating a musculoskeletal disease or disorder by administering a therapeutically affective amount of a pharmaceutical composition comprising a CRISPR gene-editing system targeting the SCN8A gene, as described herein, to a subject in need thereof. In some embodiments, the musculoskeletal disease or disorder is Arthritis, Infectious Intermittent joint effusion, Ankylosing spondylitis, Arthritis, Osteoarthritis, Spondylarthritis, Plantar fasciitis, Degenerative polyarthritis, Hemophilic arthropathy, Inflammatory myopathy with abundant macrophages, or Polymyositis.

[0778] In yet other embodiments, a method is provided for treating an inflammatory disease or disorder by administering a therapeutically affective amount of a pharmaceutical composition comprising a CRISPR gene-editing system targeting the SCN8A gene, as described herein, to a subject in need thereof. In some embodiments, the inflammatory disease or disorder is Autoinflammatory Disease (AID), Cryopyrin Associated Periodic syndrome (CAPS), Familial Mediterranean Fever (FMF), TNF-Receptor Associated Periodic Syndrome (TRAPS), Hyper-IgD Syndrome (HIDS), Systemic Lupus Erythematosus (SLE), or Fibrosis (general).

[0779] In certain embodiments, any region of an SCN8A gene (e.g., 5′ untranslated region [UTR], exon 1, exon 2, exon 3, exon 4, exon 5, exon 6, exon 7, exon 8, exon 9, exon 10, exon 11, exon 12, exon 13, exon 14, exon 15, exon 16, exon 17, exon 18, exon 19, exon 20, exon 21, exon 22, exon 23, exon 24, exon 25, exon 26, exon 27, exon 28, exon 29, exon 30, exon 31, any intervening intronic regions, intron/exon junctions, the 3′ UTR, or polyadenylation signal) is targeted by an RNA-guided nuclease to alter the gene. In some embodiments, the SCN8A gene targeted by an RNA-guided nuclease is from a mammal. In some embodiments, the SCN8A gene targeted by an RNA-guided nuclease is from a human (hSCN8A). In some embodiments, the SCN8A gene targeted by an RNA-guided nuclease is from a dog (cSCN8A). In some embodiments, the SCN8A gene targeted by an RNA-guided nuclease is from a horse (eSCN8A). In some embodiments, the SCN8A gene targeted by an RNA-guided nuclease is from a cat (fSCN8A).

### DDD. SCN9A

[0780] In one aspect, methods and pharmaceutical compositions are provided for treating a back or spine condition or disorder by administering a therapeutically effective amount of a CRISPR pharmaceutical composition that targets an SCN9A gene to a subject in need thereof. In some embodiments, the CRISPR pharmaceutical composition comprises an RNA-guided nuclease and an sgRNA targeting the SCN9A gene with a crRNA sequence selected from SEQ ID NOs: 2148-2195. In some embodiments, the crRNA sequence is selected from SEQ ID NOs: 2148-2172. In some embodiments, the crRNA sequence is selected from 2148-2157. In some embodiments, the RNA-guided nuclease is a Cas9 protein. In some embodiments, the Cas9 protein is an S. pyogenes Cas9 protein. In some embodiments, the S. pyogenes Cas9 protein comprises K848A, K1003A, and R1060A amino acid substitutions relative to the SpCas9 sequence of NCBI accession number 7S37_P. In some embodiments, the S. pyogenes Cas9 protein comprises an R691A amino acid substitution relative to the SpCas9 sequence of NCBI accession number 7S37_P.

[0781] In some embodiments, the CRISPR gene-editing system targeting the SCN9A gene is delivered to a mammalian cell via viral vector. In some embodiments, the CRISPR gene-editing system targeting the SCN9A gene is delivered to a mammalian cell via an AAV vector. In some embodiments, the CRISPR gene-editing system targeting the SCN9A gene is delivered to a mammalian cell via a lentiviral vector. In some embodiments, the CRISPR gene-editing system targeting the SCN9A gene is delivered to a mammalian cell via a lipid nanoparticle. In some embodiments, the CRISPR gene-editing system targeting the SCN9A gene is delivered to a mammalian cell via a virus-like particle. In some embodiments, the CRISPR gene-editing system targeting the SCN9A gene is delivered to a mammalian cell via a liposome. In some embodiments, the CRISPR gene-editing system targeting the SCN9A gene is delivered to a mammalian cell via a lipid nanocrystal.

[0782] In some embodiments, the pharmaceutical composition comprises an sgRNA having a crRNA sequence selected from SEQ ID NOs: 2148-2195 and a S. pyogenes Cas9 protein, optionally comprising K848A, K1003A, and R1060A amino acid substitutions or an R691A amino acid substitution, encapsulated in i) a viral vector selected from an AAV vector and a lentiviral vector; ii) a lipid nanoparticle; iii) a virus-like particle; iv) a liposome; or v) a lipid nanocrystal. In some embodiments, the pharmaceutical composition comprises an sgRNA having a crRNA sequence selected from SEQ ID NOs: 2148-2195 and a S. pyogenes Cas9 protein encapsulated in a lipid nanoparticle.

[0783] In various embodiments, the pharmaceutical composition comprising a CRISPR gene-editing system targeting the SCN9A gene is used in a method of treating a mammal in need thereof. In some embodiments, the method treats a discogenic disease or disorder. In some embodiments, the discogenic disease or disorder is low back pain, neck pain, lumbar pain, degenerative disc disease, discogenic pain annual ligament tear, herniated disc, spinal facet joint arthritis, intervertebral disc disease, spondylosis, painful scoliosis, or spinal stenosis. In some embodiments, the discogenic disease or disorder is discogenic pain.

[0784] In some embodiments, a method is provided for treating a discogenic disease or disorder by administering a therapeutically affective amount of a pharmaceutical composition comprising a CRISPR gene-editing system targeting the SCN9A gene, as described herein, to a subject in need thereof. In some embodiments, the pharmaceutical composition comprises an LNP encapsuling an sgRNA having a crRNA sequence selected from SEQ ID NOs: 2148-2195 and a S. pyogenes Cas9 protein. In some embodiments, the crRNA sequence is selected from SEQ ID NOs: 2148-2172. In some embodiments, the crRNA sequence is selected from SEQ ID NOs: 2148-2157. In some embodiments, the pharmaceutical composition is administered by intradiscal injection.

[0785] In some embodiments, a method is provided for treating a musculoskeletal disease or disorder by administering a therapeutically affective amount of a pharmaceutical composition comprising a CRISPR gene-editing system targeting the SCN9A gene, as described herein, to a subject in need thereof. In some embodiments, the musculoskeletal disease or disorder is Arthritis, Infectious Intermittent joint effusion, Ankylosing spondylitis, Arthritis, Osteoarthritis, Spondylarthritis, Plantar fasciitis, Degenerative polyarthritis, Hemophilic arthropathy, Inflammatory myopathy with abundant macrophages, or Polymyositis.

[0786] In yet other embodiments, a method is provided for treating an inflammatory disease or disorder by administering a therapeutically affective amount of a pharmaceutical composition comprising a CRISPR gene-editing system targeting the SCN9A gene, as described herein, to a subject in need thereof. In some embodiments, the inflammatory disease or disorder is Autoinflammatory Disease (AID), Cryopyrin Associated Periodic syndrome (CAPS), Familial Mediterranean Fever (FMF), TNF-Receptor Associated Periodic Syndrome (TRAPS), Hyper-IgD Syndrome (HIDS), Systemic Lupus Erythematosus (SLE), or Fibrosis (general).

[0787] In certain embodiments, any region of an SCN9A gene (e.g., 5′ untranslated region [UTR], exon 1, exon 2, exon 3, exon 4, exon 5, exon 6, exon 7, exon 8, exon 9, exon 10, exon 11, exon 12, exon 13, exon 14, exon 15, exon 16, exon 17, exon 18, exon 19, exon 20, exon 21, exon 22, exon 23, exon 24, exon 25, exon 26, exon 27, exon 28, exon 29, any intervening intronic regions, intron/exon junctions, the 3′ UTR, or polyadenylation signal) is targeted by an RNA-guided nuclease to alter the gene. In some embodiments, the SCN9A gene targeted by an RNA-guided nuclease is from a mammal. In some embodiments, the SCN9A gene targeted by an RNA-guided nuclease is from a human (hSCN9A). In some embodiments, the SCN9A gene targeted by an RNA-guided nuclease is from a dog (cSCN9A). In some embodiments, the SCN9A gene targeted by an RNA-guided nuclease is from a horse (eSCN9A). In some embodiments, the SCN9A gene targeted by an RNA-guided nuclease is from a cat (fSCN9A).

### EEE. SCN10A

[0788] In one aspect, methods and pharmaceutical compositions are provided for treating a back or spine condition or disorder by administering a therapeutically effective amount of a CRISPR pharmaceutical composition that targets an SCN10A gene to a subject in need thereof. In some embodiments, the CRISPR pharmaceutical composition comprises an RNA-guided nuclease and an sgRNA targeting the SCN10A gene with a crRNA sequence selected from SEQ ID NOs: 2196-2243. In some embodiments, the crRNA sequence is selected from SEQ ID NOs: 2196-2220. In some embodiments, the crRNA sequence is selected from 2196-2205. In some embodiments, the RNA-guided nuclease is a Cas9 protein. In some embodiments, the Cas9 protein is an S. pyogenes Cas9 protein. In some embodiments, the S. pyogenes Cas9 protein comprises K848A, K1003A, and R1060A amino acid substitutions relative to the SpCas9 sequence of NCBI accession number 7S37_P. In some embodiments, the S. pyogenes Cas9 protein comprises an R691A amino acid substitution relative to the SpCas9 sequence of NCBI accession number 7S37_P.

[0789] In some embodiments, the CRISPR gene-editing system targeting the SCN10A gene is delivered to a mammalian cell via viral vector. In some embodiments, the CRISPR gene-editing system targeting the SCN10A gene is delivered to a mammalian cell via an AAV vector. In some embodiments, the CRISPR gene-editing system targeting the SCN10A gene is delivered to a mammalian cell via a lentiviral vector. In some embodiments, the CRISPR gene-editing system targeting the SCN10A gene is delivered to a mammalian cell via a lipid nanoparticle. In some embodiments, the CRISPR gene-editing system targeting the SCN10A gene is delivered to a mammalian cell via a virus-like particle. In some embodiments, the CRISPR gene-editing system targeting the SCN10A gene is delivered to a mammalian cell via a liposome. In some embodiments, the CRISPR gene-editing system targeting the SCN10A gene is delivered to a mammalian cell via a lipid nanocrystal.

[0790] In some embodiments, the pharmaceutical composition comprises an sgRNA having a crRNA sequence selected from SEQ ID NOs: 2196-2243 and a S. pyogenes Cas9 protein, optionally comprising K848A, K1003A, and R1060A amino acid substitutions or an R691A amino acid substitution, encapsulated in i) a viral vector selected from an AAV vector and a lentiviral vector; ii) a lipid nanoparticle; iii) a virus-like particle; iv) a liposome; or v) a lipid nanocrystal. In some embodiments, the pharmaceutical composition comprises an sgRNA having a crRNA sequence selected from SEQ ID NOs: 2196-2243 and a S. pyogenes Cas9 protein encapsulated in a lipid nanoparticle.

[0791] In various embodiments, the pharmaceutical composition comprising a CRISPR gene-editing system targeting the SCN10A gene is used in a method of treating a mammal in need thereof. In some embodiments, the method treats a discogenic disease or disorder. In some embodiments, the discogenic disease or disorder is low back pain, neck pain, lumbar pain, degenerative disc disease, discogenic pain annual ligament tear, herniated disc, spinal facet joint arthritis, intervertebral disc disease, spondylosis, painful scoliosis, or spinal stenosis. In some embodiments, the discogenic disease or disorder is discogenic pain.

[0792] In some embodiments, a method is provided for treating a discogenic disease or disorder by administering a therapeutically affective amount of a pharmaceutical composition comprising a CRISPR gene-editing system targeting the SCN10A gene, as described herein, to a subject in need thereof. In some embodiments, the pharmaceutical composition comprises an LNP encapsuling an sgRNA having a crRNA sequence selected from SEQ ID NOs: 2196-2243 and a S. pyogenes Cas9 protein. In some embodiments, the crRNA sequence is selected from SEQ ID NOs: 2196-2220. In some embodiments, the crRNA sequence is selected from SEQ ID NOs: 2196-2205. In some embodiments, the pharmaceutical composition is administered by intradiscal injection.

[0793] In some embodiments, a method is provided for treating a musculoskeletal disease or disorder by administering a therapeutically affective amount of a pharmaceutical composition comprising a CRISPR gene-editing system targeting the SCN10A gene, as described herein, to a subject in need thereof. In some embodiments, the musculoskeletal disease or disorder is Arthritis, Infectious Intermittent joint effusion, Ankylosing spondylitis, Arthritis, Osteoarthritis, Spondylarthritis, Plantar fasciitis, Degenerative polyarthritis, Hemophilic arthropathy, Inflammatory myopathy with abundant macrophages, or Polymyositis.

[0794] In yet other embodiments, a method is provided for treating an inflammatory disease or disorder by administering a therapeutically affective amount of a pharmaceutical composition comprising a CRISPR gene-editing system targeting the SCN10A gene, as described herein, to a subject in need thereof. In some embodiments, the inflammatory disease or disorder is Autoinflammatory Disease (AID), Cryopyrin Associated Periodic syndrome (CAPS), Familial Mediterranean Fever (FMF), TNF-Receptor Associated Periodic Syndrome (TRAPS), Hyper-IgD Syndrome (HIDS), Systemic Lupus Erythematosus (SLE), or Fibrosis (general).

[0795] In certain embodiments, any region of an SCN10A gene (e.g., 5′ untranslated region [UTR], exon 1, exon 2, exon 3, exon 4, exon 5, exon 6, exon 7, exon 8, exon 9, exon 10, exon 11, exon 12, exon 13, exon 14, exon 15, exon 16, exon 17, exon 18, exon 19, exon 20, exon 21, exon 22, exon 23, exon 24, exon 25, exon 26, exon 27, exon 28, any intervening intronic regions, intron/exon junctions, the 3′ UTR, or polyadenylation signal) is targeted by an RNA-guided nuclease to alter the gene. In some embodiments, the SCN10A gene targeted by an RNA-guided nuclease is from a mammal. In some embodiments, the SCN10A gene targeted by an RNA-guided nuclease is from a human (hSCN10A). In some embodiments, the SCN10A gene targeted by an RNA-guided nuclease is from a dog (cSCN10A). In some embodiments, the SCN10A gene targeted by an RNA-guided nuclease is from a horse (eSCN10A). In some embodiments, the SCN10A gene targeted by an RNA-guided nuclease is from a cat (fSCN10A).

### FFF. SCN11A

[0796] In one aspect, methods and pharmaceutical compositions are provided for treating a back or spine condition or disorder by administering a therapeutically effective amount of a CRISPR pharmaceutical composition that targets an SCN11A gene to a subject in need thereof. In some embodiments, the CRISPR pharmaceutical composition comprises an RNA-guided nuclease and an sgRNA targeting the SCN11A gene with a crRNA sequence selected from SEQ ID NOs: 2244-2291. In some embodiments, the crRNA sequence is selected from SEQ ID NOs: 2244-2268. In some embodiments, the crRNA sequence is selected from 2244-2253. In some embodiments, the RNA-guided nuclease is a Cas9 protein. In some embodiments, the Cas9 protein is an S. pyogenes Cas9 protein. In some embodiments, the S. pyogenes Cas9 protein comprises K848A, K1003A, and R1060A amino acid substitutions relative to the SpCas9 sequence of NCBI accession number 7S37_P. In some embodiments, the S. pyogenes Cas9 protein comprises an R691A amino acid substitution relative to the SpCas9 sequence of NCBI accession number 7S37_P.

[0797] In some embodiments, the CRISPR gene-editing system targeting the SCN11A gene is delivered to a mammalian cell via viral vector. In some embodiments, the CRISPR gene-editing system targeting the SCN11A gene is delivered to a mammalian cell via an AAV vector. In some embodiments, the CRISPR gene-editing system targeting the SCN11A gene is delivered to a mammalian cell via a lentiviral vector. In some embodiments, the CRISPR gene-editing system targeting the SCN11A gene is delivered to a mammalian cell via a lipid nanoparticle. In some embodiments, the CRISPR gene-editing system targeting the SCN11A gene is delivered to a mammalian cell via a virus-like particle. In some embodiments, the CRISPR gene-editing system targeting the SCN11A gene is delivered to a mammalian cell via a liposome. In some embodiments, the CRISPR gene-editing system targeting the SCN1 TA gene is delivered to a mammalian cell via a lipid nanocrystal.

[0798] In some embodiments, the pharmaceutical composition comprises an sgRNA having a crRNA sequence selected from SEQ ID NOs: 2244-2291 and a S. pyogenes Cas9 protein, optionally comprising K848A, K1003A, and R1060A amino acid substitutions or an R691A amino acid substitution, encapsulated in i) a viral vector selected from an AAV vector and a lentiviral vector; ii) a lipid nanoparticle; iii) a virus-like particle; iv) a liposome; or v) a lipid nanocrystal. In some embodiments, the pharmaceutical composition comprises an sgRNA having a crRNA sequence selected from SEQ ID NOs: 2244-2291 and a S. pyogenes Cas9 protein encapsulated in a lipid nanoparticle.

[0799] In various embodiments, the pharmaceutical composition comprising a CRISPR gene-editing system targeting the SCN11A gene is used in a method of treating a mammal in need thereof. In some embodiments, the method treats a discogenic disease or disorder. In some embodiments, the discogenic disease or disorder is low back pain, neck pain, lumbar pain, degenerative disc disease, discogenic pain annual ligament tear, herniated disc, spinal facet joint arthritis, intervertebral disc disease, spondylosis, painful scoliosis, or spinal stenosis. In some embodiments, the discogenic disease or disorder is discogenic pain.

[0800] In some embodiments, a method is provided for treating a discogenic disease or disorder by administering a therapeutically affective amount of a pharmaceutical composition comprising a CRISPR gene-editing system targeting the SCN11A gene, as described herein, to a subject in need thereof. In some embodiments, the pharmaceutical composition comprises an LNP encapsuling an sgRNA having a crRNA sequence selected from SEQ ID NOs: 2244-2291 and a S. pyogenes Cas9 protein. In some embodiments, the crRNA sequence is selected from SEQ ID NOs: 2244-2268. In some embodiments, the crRNA sequence is selected from SEQ ID NOs: 2244-2253. In some embodiments, the pharmaceutical composition is administered by intradiscal injection.

[0801] In some embodiments, a method is provided for treating a musculoskeletal disease or disorder by administering a therapeutically affective amount of a pharmaceutical composition comprising a CRISPR gene-editing system targeting the SCN11A gene, as described herein, to a subject in need thereof. In some embodiments, the musculoskeletal disease or disorder is Arthritis, Infectious Intermittent joint effusion, Ankylosing spondylitis, Arthritis, Osteoarthritis, Spondylarthritis, Plantar fasciitis, Degenerative polyarthritis, Hemophilic arthropathy, Inflammatory myopathy with abundant macrophages, or Polymyositis.

[0802] In yet other embodiments, a method is provided for treating an inflammatory disease or disorder by administering a therapeutically affective amount of a pharmaceutical composition comprising a CRISPR gene-editing system targeting the SCN11A gene, as described herein, to a subject in need thereof. In some embodiments, the inflammatory disease or disorder is Autoinflammatory Disease (AID), Cryopyrin Associated Periodic syndrome (CAPS), Familial Mediterranean Fever (FMF), TNF-Receptor Associated Periodic Syndrome (TRAPS), Hyper-IgD Syndrome (HIDS), Systemic Lupus Erythematosus (SLE), or Fibrosis (general).

[0803] In certain embodiments, any region of an SCN11A gene (e.g., 5′ untranslated region [UTR], exon 1, exon 2, exon 3, exon 4, exon 5, exon 6, exon 7, exon 8, exon 9, exon 10, exon 11, exon 12, exon 13, exon 14, exon 15, exon 16, exon 17, exon 18, exon 19, exon 20, exon 21, exon 22, exon 23, exon 24, exon 25, exon 26, exon 27, exon 28, exon 29, exon 30, exon 31, exon 32, exon 33, exon 34, exon 35, any intervening intronic regions, intron/exon junctions, the 3′ UTR, or polyadenylation signal) is targeted by an RNA-guided nuclease to alter the gene. In some embodiments, the SCN11A gene targeted by an RNA-guided nuclease is from a mammal. In some embodiments, the SCN11A gene targeted by an RNA-guided nuclease is from a human (hSCN11A). In some embodiments, the SCN11A gene targeted by an RNA-guided nuclease is from a dog (cSCN11A). In some embodiments, the SCN11A gene targeted by an RNA-guided nuclease is from a horse (eSCN11A). In some embodiments, the SCN11A gene targeted by an RNA-guided nuclease is from a cat (fSCN11A).

### GGG. NGF

[0804] In one aspect, methods and pharmaceutical compositions are provided for treating a back or spine condition or disorder by administering a therapeutically effective amount of a CRISPR pharmaceutical composition that targets an NGF gene to a subject in need thereof. In some embodiments, the CRISPR pharmaceutical composition comprises an RNA-guided nuclease and an sgRNA targeting the NGF gene with a crRNA sequence selected from SEQ ID NOs: 1586-1628. In some embodiments, the crRNA sequence is selected from SEQ ID NOs: 1586-1610. In some embodiments, the crRNA sequence is selected from 1586-1595. In some embodiments, the RNA-guided nuclease is a Cas9 protein. In some embodiments, the Cas9 protein is an S. pyogenes Cas9 protein. In some embodiments, the S. pyogenes Cas9 protein comprises K848A, K1003A, and R1060A amino acid substitutions relative to the SpCas9 sequence of NCBI accession number 7S37_P. In some embodiments, the S. pyogenes Cas9 protein comprises an R691A amino acid substitution relative to the SpCas9 sequence of NCBI accession number 7S37_P.

[0805] In some embodiments, the CRISPR gene-editing system targeting the NGF gene is delivered to a mammalian cell via viral vector. In some embodiments, the CRISPR gene-editing system targeting the NGF gene is delivered to a mammalian cell via an AAV vector. In some embodiments, the CRISPR gene-editing system targeting the NGF gene is delivered to a mammalian cell via a lentiviral vector. In some embodiments, the CRISPR gene-editing system targeting the NGF gene is delivered to a mammalian cell via a lipid nanoparticle. In some embodiments, the CRISPR gene-editing system targeting the NGF gene is delivered to a mammalian cell via a virus-like particle. In some embodiments, the CRISPR gene-editing system targeting the NGF gene is delivered to a mammalian cell via a liposome. In some embodiments, the CRISPR gene-editing system targeting the NGF gene is delivered to a mammalian cell via a lipid nanocrystal.

[0806] In some embodiments, the pharmaceutical composition comprises an sgRNA having a crRNA sequence selected from SEQ ID NOs: 1586-1628 and a S. pyogenes Cas9 protein, optionally comprising K848A, K1003A, and R1060A amino acid substitutions or an R691A amino acid substitution, encapsulated in i) a viral vector selected from an AAV vector and a lentiviral vector; ii) a lipid nanoparticle; iii) a virus-like particle; iv) a liposome; or v) a lipid nanocrystal. In some embodiments, the pharmaceutical composition comprises an sgRNA having a crRNA sequence selected from SEQ ID NOs: 1586-1628 and a S. pyogenes Cas9 protein encapsulated in a lipid nanoparticle.

[0807] In various embodiments, the pharmaceutical composition comprising a CRISPR gene-editing system targeting the NGF gene is used in a method of treating a mammal in need thereof. In some embodiments, the method treats a discogenic disease or disorder. In some embodiments, the discogenic disease or disorder is low back pain, neck pain, lumbar pain, degenerative disc disease, discogenic pain annual ligament tear, herniated disc, spinal facet joint arthritis, intervertebral disc disease, spondylosis, painful scoliosis, or spinal stenosis. In some embodiments, the discogenic disease or disorder is discogenic pain.

[0808] In some embodiments, a method is provided for treating a discogenic disease or disorder by administering a therapeutically affective amount of a pharmaceutical composition comprising a CRISPR gene-editing system targeting the NGF gene, as described herein, to a subject in need thereof. In some embodiments, the pharmaceutical composition comprises an LNP encapsuling an sgRNA having a crRNA sequence selected from SEQ ID NOs: 1586-1628 and a S. pyogenes Cas9 protein. In some embodiments, the crRNA sequence is selected from SEQ ID NOs: 1586-1610. In some embodiments, the crRNA sequence is selected from SEQ ID NOs: 1586-1595. In some embodiments, the pharmaceutical composition is administered by intradiscal injection.

[0809] In some embodiments, a method is provided for treating a musculoskeletal disease or disorder by administering a therapeutically affective amount of a pharmaceutical composition comprising a CRISPR gene-editing system targeting the NGF gene, as described herein, to a subject in need thereof. In some embodiments, the musculoskeletal disease or disorder is Arthritis, Infectious Intermittent joint effusion, Ankylosing spondylitis, Arthritis, Osteoarthritis, Spondylarthritis, Plantar fasciitis, Degenerative polyarthritis, Hemophilic arthropathy, Inflammatory myopathy with abundant macrophages, or Polymyositis.

[0810] In yet other embodiments, a method is provided for treating an inflammatory disease or disorder by administering a therapeutically affective amount of a pharmaceutical composition comprising a CRISPR gene-editing system targeting the NGF gene, as described herein, to a subject in need thereof. In some embodiments, the inflammatory disease or disorder is Autoinflammatory Disease (AID), Cryopyrin Associated Periodic syndrome (CAPS), Familial Mediterranean Fever (FMF), TNF-Receptor Associated Periodic Syndrome (TRAPS), Hyper-IgD Syndrome (HIDS), Systemic Lupus Erythematosus (SLE), or Fibrosis (general).

[0811] In certain embodiments, any region of an NGF gene (e.g., 5′ untranslated region [UTR], exon 1, exon 2, exon 3, exon 4, any intervening intronic regions, intron/exon junctions, the 3′ UTR, or polyadenylation signal) is targeted by an RNA-guided nuclease to alter the gene. In some embodiments, the NGF gene targeted by an RNA-guided nuclease is from a mammal. In some embodiments, the NGF gene targeted by an RNA-guided nuclease is from a human (hNGF). In some embodiments, the NGF gene targeted by an RNA-guided nuclease is from a dog (cNGF). In some embodiments, the NGF gene targeted by an RNA-guided nuclease is from a horse (eNGF). In some embodiments, the NGF gene targeted by an RNA-guided nuclease is from a cat (fNGF).

### HHH. NGFR

[0812] In one aspect, methods and pharmaceutical compositions are provided for treating a back or spine condition or disorder by administering a therapeutically effective amount of a CRISPR pharmaceutical composition that targets an NGFR gene to a subject in need thereof. In some embodiments, the CRISPR pharmaceutical composition comprises an RNA-guided nuclease and an sgRNA targeting the NGFR gene with a crRNA sequence selected from SEQ ID NOs: 1629-1676. In some embodiments, the crRNA sequence is selected from SEQ ID NOs: 1629-1653. In some embodiments, the crRNA sequence is selected from 1629-1638. In some embodiments, the RNA-guided nuclease is a Cas9 protein. In some embodiments, the Cas9 protein is an S. pyogenes Cas9 protein. In some embodiments, the S. pyogenes Cas9 protein comprises K848A, K1003A, and R1060A amino acid substitutions relative to the SpCas9 sequence of NCBI accession number 7S37_P. In some embodiments, the S. pyogenes Cas9 protein comprises an R691A amino acid substitution relative to the SpCas9 sequence of NCBI accession number 7S37_P.

[0813] In some embodiments, the CRISPR gene-editing system targeting the NGFR gene is delivered to a mammalian cell via viral vector. In some embodiments, the CRISPR gene-editing system targeting the NGFR gene is delivered to a mammalian cell via an AAV vector. In some embodiments, the CRISPR gene-editing system targeting the NGFR gene is delivered to a mammalian cell via a lentiviral vector. In some embodiments, the CRISPR gene-editing system targeting the NGFR gene is delivered to a mammalian cell via a lipid nanoparticle. In some embodiments, the CRISPR gene-editing system targeting the NGFR gene is delivered to a mammalian cell via a virus-like particle. In some embodiments, the CRISPR gene-editing system targeting the NGFR gene is delivered to a mammalian cell via a liposome. In some embodiments, the CRISPR gene-editing system targeting the NGFR gene is delivered to a mammalian cell via a lipid nanocrystal.

[0814] In some embodiments, the pharmaceutical composition comprises an sgRNA having a crRNA sequence selected from SEQ ID NOs: 1629-1676 and a S. pyogenes Cas9 protein, optionally comprising K848A, K1003A, and R1060A amino acid substitutions or an R691A amino acid substitution, encapsulated in i) a viral vector selected from an AAV vector and a lentiviral vector; ii) a lipid nanoparticle; iii) a virus-like particle; iv) a liposome; or v) a lipid nanocrystal. In some embodiments, the pharmaceutical composition comprises an sgRNA having a crRNA sequence selected from SEQ ID NOs: 1629-1676 and a S. pyogenes Cas9 protein encapsulated in a lipid nanoparticle.

[0815] In various embodiments, the pharmaceutical composition comprising a CRISPR gene-editing system targeting the NGFR gene is used in a method of treating a mammal in need thereof. In some embodiments, the method treats a discogenic disease or disorder. In some embodiments, the discogenic disease or disorder is low back pain, neck pain, lumbar pain, degenerative disc disease, discogenic pain annual ligament tear, herniated disc, spinal facet joint arthritis, intervertebral disc disease, spondylosis, painful scoliosis, or spinal stenosis. In some embodiments, the discogenic disease or disorder is discogenic pain.

[0816] In some embodiments, a method is provided for treating a discogenic disease or disorder by administering a therapeutically affective amount of a pharmaceutical composition comprising a CRISPR gene-editing system targeting the NGFR gene, as described herein, to a subject in need thereof. In some embodiments, the pharmaceutical composition comprises an LNP encapsuling an sgRNA having a crRNA sequence selected from SEQ ID NOs: 1629-1676 and a S. pyogenes Cas9 protein. In some embodiments, the crRNA sequence is selected from SEQ ID NOs: 1629-1653. In some embodiments, the crRNA sequence is selected from SEQ ID NOs: 1629-1638. In some embodiments, the pharmaceutical composition is administered by intradiscal injection.

[0817] In some embodiments, a method is provided for treating a musculoskeletal disease or disorder by administering a therapeutically affective amount of a pharmaceutical composition comprising a CRISPR gene-editing system targeting the NGFR gene, as described herein, to a subject in need thereof. In some embodiments, the musculoskeletal disease or disorder is Arthritis, Infectious Intermittent joint effusion, Ankylosing spondylitis, Arthritis, Osteoarthritis, Spondylarthritis, Plantar fasciitis, Degenerative polyarthritis, Hemophilic arthropathy, Inflammatory myopathy with abundant macrophages, or Polymyositis.

[0818] In yet other embodiments, a method is provided for treating an inflammatory disease or disorder by administering a therapeutically affective amount of a pharmaceutical composition comprising a CRISPR gene-editing system targeting the NGFR gene, as described herein, to a subject in need thereof. In some embodiments, the inflammatory disease or disorder is Autoinflammatory Disease (AID), Cryopyrin Associated Periodic syndrome (CAPS), Familial Mediterranean Fever (FMF), TNF-Receptor Associated Periodic Syndrome (TRAPS), Hyper-IgD Syndrome (HIDS), Systemic Lupus Erythematosus (SLE), or Fibrosis (general).

[0819] In certain embodiments, any region of an NGFR gene (e.g., 5′ untranslated region [UTR], exon 1, exon 2, exon 3, exon 4, exon 5, exon 6, any intervening intronic regions, intron/exon junctions, the 3′ UTR, or polyadenylation signal) is targeted by an RNA-guided nuclease to alter the gene. In some embodiments, the NGFR gene targeted by an RNA-guided nuclease is from a mammal. In some embodiments, the NGFR gene targeted by an RNA-guided nuclease is from a human (hNGFR). In some embodiments, the NGFR gene targeted by an RNA-guided nuclease is from a dog (cNGFR). In some embodiments, the NGFR gene targeted by an RNA-guided nuclease is from a horse (eNGFR). In some embodiments, the NGFR gene targeted by an RNA-guided nuclease is from a cat (fNGFR).

### III. NTF3

[0820] In one aspect, methods and pharmaceutical compositions are provided for treating a back or spine condition or disorder by administering a therapeutically effective amount of a CRISPR pharmaceutical composition that targets an NTF3 gene to a subject in need thereof. In some embodiments, the CRISPR pharmaceutical composition comprises an RNA-guided nuclease and an sgRNA targeting the NTF3 gene with a crRNA sequence selected from SEQ ID NOs: 1677-1724. In some embodiments, the crRNA sequence is selected from SEQ ID NOs: 1677-1701. In some embodiments, the crRNA sequence is selected from 1677-1686. In some embodiments, the RNA-guided nuclease is a Cas9 protein. In some embodiments, the Cas9 protein is an S. pyogenes Cas9 protein. In some embodiments, the S. pyogenes Cas9 protein comprises K848A, K1003A, and R1060A amino acid substitutions relative to the SpCas9 sequence of NCBI accession number 7S37_P. In some embodiments, the S. pyogenes Cas9 protein comprises an R691A amino acid substitution relative to the SpCas9 sequence of NCBI accession number 7S37_P.

[0821] In some embodiments, the CRISPR gene-editing system targeting the NTF3 gene is delivered to a mammalian cell via viral vector. In some embodiments, the CRISPR gene-editing system targeting the NTF3 gene is delivered to a mammalian cell via an AAV vector. In some embodiments, the CRISPR gene-editing system targeting the NTF3 gene is delivered to a mammalian cell via a lentiviral vector. In some embodiments, the CRISPR gene-editing system targeting the NTF3 gene is delivered to a mammalian cell via a lipid nanoparticle. In some embodiments, the CRISPR gene-editing system targeting the NTF3 gene is delivered to a mammalian cell via a virus-like particle. In some embodiments, the CRISPR gene-editing system targeting the NTF3 gene is delivered to a mammalian cell via a liposome. In some embodiments, the CRISPR gene-editing system targeting the NTF3 gene is delivered to a mammalian cell via a lipid nanocrystal.

[0822] In some embodiments, the pharmaceutical composition comprises an sgRNA having a crRNA sequence selected from SEQ ID NOs: 1677-1724 and a S. pyogenes Cas9 protein, optionally comprising K848A, K1003A, and R1060A amino acid substitutions or an R691A amino acid substitution, encapsulated in i) a viral vector selected from an AAV vector and a lentiviral vector; ii) a lipid nanoparticle; iii) a virus-like particle; iv) a liposome; or v) a lipid nanocrystal. In some embodiments, the pharmaceutical composition comprises an sgRNA having a crRNA sequence selected from SEQ ID NOs: 1677-1724 and a S. pyogenes Cas9 protein encapsulated in a lipid nanoparticle.

[0823] In various embodiments, the pharmaceutical composition comprising a CRISPR gene-editing system targeting the NTF3 gene is used in a method of treating a mammal in need thereof. In some embodiments, the method treats a discogenic disease or disorder. In some embodiments, the discogenic disease or disorder is low back pain, neck pain, lumbar pain, degenerative disc disease, discogenic pain annual ligament tear, herniated disc, spinal facet joint arthritis, intervertebral disc disease, spondylosis, painful scoliosis, or spinal stenosis. In some embodiments, the discogenic disease or disorder is discogenic pain.

[0824] In some embodiments, a method is provided for treating a discogenic disease or disorder by administering a therapeutically affective amount of a pharmaceutical composition comprising a CRISPR gene-editing system targeting the NTF3 gene, as described herein, to a subject in need thereof. In some embodiments, the pharmaceutical composition comprises an LNP encapsuling an sgRNA having a crRNA sequence selected from SEQ ID NOs: 1677-1724 and a S. pyogenes Cas9 protein. In some embodiments, the crRNA sequence is selected from SEQ ID NOs: 1677-1701. In some embodiments, the crRNA sequence is selected from SEQ ID NOs: 1677-1686. In some embodiments, the pharmaceutical composition is administered by intradiscal injection.

[0825] In some embodiments, a method is provided for treating a musculoskeletal disease or disorder by administering a therapeutically affective amount of a pharmaceutical composition comprising a CRISPR gene-editing system targeting the NTF3 gene, as described herein, to a subject in need thereof. In some embodiments, the musculoskeletal disease or disorder is Arthritis, Infectious Intermittent joint effusion, Ankylosing spondylitis, Arthritis, Osteoarthritis, Spondylarthritis, Plantar fasciitis, Degenerative polyarthritis, Hemophilic arthropathy, Inflammatory myopathy with abundant macrophages, or Polymyositis.

[0826] In yet other embodiments, a method is provided for treating an inflammatory disease or disorder by administering a therapeutically affective amount of a pharmaceutical composition comprising a CRISPR gene-editing system targeting the NTF3 gene, as described herein, to a subject in need thereof. In some embodiments, the inflammatory disease or disorder is Autoinflammatory Disease (AID), Cryopyrin Associated Periodic syndrome (CAPS), Familial Mediterranean Fever (FMF), TNF-Receptor Associated Periodic Syndrome (TRAPS), Hyper-IgD Syndrome (HIDS), Systemic Lupus Erythematosus (SLE), or Fibrosis (general).

[0827] In certain embodiments, any region of an NTF3 gene (e.g., 5′ untranslated region [UTR], exon 1, exon 2, exon 3, exon 4, any intervening intronic regions, intron/exon junctions, the 3′ UTR, or polyadenylation signal) is targeted by an RNA-guided nuclease to alter the gene. In some embodiments, the NTF3 gene targeted by an RNA-guided nuclease is from a mammal. In some embodiments, the NTF3 gene targeted by an RNA-guided nuclease is from a human (hNTF3). In some embodiments, the NTF3 gene targeted by an RNA-guided nuclease is from a dog (cNTF3). In some embodiments, the NTF3 gene targeted by an RNA-guided nuclease is from a horse (eNTF3). In some embodiments, the NTF3 gene targeted by an RNA-guided nuclease is from a cat (fNTF3).

### JJJ. NTF4

[0828] In one aspect, methods and pharmaceutical compositions are provided for treating a back or spine condition or disorder by administering a therapeutically effective amount of a CRISPR pharmaceutical composition that targets an NTF4 gene to a subject in need thereof. In some embodiments, the CRISPR pharmaceutical composition comprises an RNA-guided nuclease and an sgRNA targeting the NTF4 gene with a crRNA sequence selected from SEQ ID NOs: 1725-1746. In some embodiments, the crRNA sequence is selected from 1725-1734. In some embodiments, the RNA-guided nuclease is a Cas9 protein. In some embodiments, the Cas9 protein is an S. pyogenes Cas9 protein. In some embodiments, the S. pyogenes Cas9 protein comprises K848A, K1003A, and R1060A amino acid substitutions relative to the SpCas9 sequence of NCBI accession number 7S37_P. In some embodiments, the S. pyogenes Cas9 protein comprises an R691A amino acid substitution relative to the SpCas9 sequence of NCBI accession number 7S37_P.

[0829] In some embodiments, the CRISPR gene-editing system targeting the NTF4 gene is delivered to a mammalian cell via viral vector. In some embodiments, the CRISPR gene-editing system targeting the NTF4 gene is delivered to a mammalian cell via an AAV vector. In some embodiments, the CRISPR gene-editing system targeting the NTF4 gene is delivered to a mammalian cell via a lentiviral vector. In some embodiments, the CRISPR gene-editing system targeting the NTF4 gene is delivered to a mammalian cell via a lipid nanoparticle. In some embodiments, the CRISPR gene-editing system targeting the NTF4 gene is delivered to a mammalian cell via a virus-like particle. In some embodiments, the CRISPR gene-editing system targeting the NTF4 gene is delivered to a mammalian cell via a liposome. In some embodiments, the CRISPR gene-editing system targeting the NTF4 gene is delivered to a mammalian cell via a lipid nanocrystal.

[0830] In some embodiments, the pharmaceutical composition comprises an sgRNA having a crRNA sequence selected from SEQ ID NOs: 1725-1746 and a S. pyogenes Cas9 protein, optionally comprising K848A, K1003A, and R1060A amino acid substitutions or an R691A amino acid substitution, encapsulated in i) a viral vector selected from an AAV vector and a lentiviral vector; ii) a lipid nanoparticle; iii) a virus-like particle; iv) a liposome; or v) a lipid nanocrystal. In some embodiments, the pharmaceutical composition comprises an sgRNA having a crRNA sequence selected from SEQ ID NOs: 1725-1746 and a S. pyogenes Cas9 protein encapsulated in a lipid nanoparticle.

[0831] In various embodiments, the pharmaceutical composition comprising a CRISPR gene-editing system targeting the NTF4 gene is used in a method of treating a mammal in need thereof. In some embodiments, the method treats a discogenic disease or disorder. In some embodiments, the discogenic disease or disorder is low back pain, neck pain, lumbar pain, degenerative disc disease, discogenic pain annual ligament tear, herniated disc, spinal facet joint arthritis, intervertebral disc disease, spondylosis, painful scoliosis, or spinal stenosis. In some embodiments, the discogenic disease or disorder is discogenic pain.

[0832] In some embodiments, a method is provided for treating a discogenic disease or disorder by administering a therapeutically affective amount of a pharmaceutical composition comprising a CRISPR gene-editing system targeting the NTF4 gene, as described herein, to a subject in need thereof. In some embodiments, the pharmaceutical composition comprises an LNP encapsuling an sgRNA having a crRNA sequence selected from SEQ ID NOs: 1725-1746 and a S. pyogenes Cas9 protein. In some embodiments, the crRNA sequence is selected from SEQ ID NOs: 1725-1734. In some embodiments, the pharmaceutical composition is administered by intradiscal injection.

[0833] In some embodiments, a method is provided for treating a musculoskeletal disease or disorder by administering a therapeutically affective amount of a pharmaceutical composition comprising a CRISPR gene-editing system targeting the NTF4 gene, as described herein, to a subject in need thereof. In some embodiments, the musculoskeletal disease or disorder is Arthritis, Infectious Intermittent joint effusion, Ankylosing spondylitis, Arthritis, Osteoarthritis, Spondylarthritis, Plantar fasciitis, Degenerative polyarthritis, Hemophilic arthropathy, Inflammatory myopathy with abundant macrophages, or Polymyositis.

[0834] In yet other embodiments, a method is provided for treating an inflammatory disease or disorder by administering a therapeutically affective amount of a pharmaceutical composition comprising a CRISPR gene-editing system targeting the NTF4 gene, as described herein, to a subject in need thereof. In some embodiments, the inflammatory disease or disorder is Autoinflammatory Disease (AID), Cryopyrin Associated Periodic syndrome (CAPS), Familial Mediterranean Fever (FMF), TNF-Receptor Associated Periodic Syndrome (TRAPS), Hyper-IgD Syndrome (HIDS), Systemic Lupus Erythematosus (SLE), or Fibrosis (general).

[0835] In certain embodiments, any region of an NTF4 gene (e.g., 5′ untranslated region [UTR], exon 1, exon 2, exon 3, exon 4, exon 5, exon 6, exon 7, any intervening intronic regions, intron/exon junctions, the 3′ UTR, or polyadenylation signal) is targeted by an RNA-guided nuclease to alter the gene. In some embodiments, the NTF4 gene targeted by an RNA-guided nuclease is from a mammal. In some embodiments, the NTF4 gene targeted by an RNA-guided nuclease is from a human (hNTF4). In some embodiments, the NTF4 gene targeted by an RNA-guided nuclease is from a dog (cNTF4). In some embodiments, the NTF4 gene targeted by an RNA-guided nuclease is from a horse (eNTF4). In some embodiments, the NTF4 gene targeted by an RNA-guided nuclease is from a cat (fNTF4).

### KKK. NTRK1

[0836] In one aspect, methods and pharmaceutical compositions are provided for treating a back or spine condition or disorder by administering a therapeutically effective amount of a CRISPR pharmaceutical composition that targets an NTRK1 gene to a subject in need thereof. In some embodiments, the CRISPR pharmaceutical composition comprises an RNA-guided nuclease and an sgRNA targeting the NTRK1 gene with a crRNA sequence selected from SEQ ID NOs: 1747-1794. In some embodiments, the crRNA sequence is selected from SEQ ID NOs: 1747-1771. In some embodiments, the crRNA sequence is selected from 1747-1756. In some embodiments, the RNA-guided nuclease is a Cas9 protein. In some embodiments, the Cas9 protein is an S. pyogenes Cas9 protein. In some embodiments, the S. pyogenes Cas9 protein comprises K848A, K1003A, and R1060A amino acid substitutions relative to the SpCas9 sequence of NCBI accession number 7S37_P. In some embodiments, the S. pyogenes Cas9 protein comprises an R691A amino acid substitution relative to the SpCas9 sequence of NCBI accession number 7S37_P.

[0837] In some embodiments, the CRISPR gene-editing system targeting the NTRK1 gene is delivered to a mammalian cell via viral vector. In some embodiments, the CRISPR gene-editing system targeting the NTRK1 gene is delivered to a mammalian cell via an AAV vector. In some embodiments, the CRISPR gene-editing system targeting the NTRK1 gene is delivered to a mammalian cell via a lentiviral vector. In some embodiments, the CRISPR gene-editing system targeting the NTRK11 gene is delivered to a mammalian cell via a lipid nanoparticle. In some embodiments, the CRISPR gene-editing system targeting the NTRK1 gene is delivered to a mammalian cell via a virus-like particle. In some embodiments, the CRISPR gene-editing system targeting the NTRK1 gene is delivered to a mammalian cell via a liposome. In some embodiments, the CRISPR gene-editing system targeting the NTRK1 gene is delivered to a mammalian cell via a lipid nanocrystal.

[0838] In some embodiments, the pharmaceutical composition comprises an sgRNA having a crRNA sequence selected from SEQ ID NOs: 1747-1794 and a S. pyogenes Cas9 protein, optionally comprising K848A, K1003A, and R1060A amino acid substitutions or an R691A amino acid substitution, encapsulated in i) a viral vector selected from an AAV vector and a lentiviral vector; ii) a lipid nanoparticle; iii) a virus-like particle; iv) a liposome; or v) a lipid nanocrystal. In some embodiments, the pharmaceutical composition comprises an sgRNA having a crRNA sequence selected from SEQ ID NOs: 1747-1794 and a S. pyogenes Cas9 protein encapsulated in a lipid nanoparticle.

[0839] In various embodiments, the pharmaceutical composition comprising a CRISPR gene-editing system targeting the NTRK1 gene is used in a method of treating a mammal in need thereof. In some embodiments, the method treats a discogenic disease or disorder. In some embodiments, the discogenic disease or disorder is low back pain, neck pain, lumbar pain, degenerative disc disease, discogenic pain annual ligament tear, herniated disc, spinal facet joint arthritis, intervertebral disc disease, spondylosis, painful scoliosis, or spinal stenosis. In some embodiments, the discogenic disease or disorder is discogenic pain.

[0840] In some embodiments, a method is provided for treating a discogenic disease or disorder by administering a therapeutically affective amount of a pharmaceutical composition comprising a CRISPR gene-editing system targeting the NTRK1 gene, as described herein, to a subject in need thereof. In some embodiments, the pharmaceutical composition comprises an LNP encapsuling an sgRNA having a crRNA sequence selected from SEQ ID NOs: 1747-1794 and a S. pyogenes Cas9 protein. In some embodiments, the crRNA sequence is selected from SEQ ID NOs: 1747-1771. In some embodiments, the crRNA sequence is selected from SEQ ID NOs: 1747-1756. In some embodiments, the pharmaceutical composition is administered by intradiscal injection.

[0841] In some embodiments, a method is provided for treating a musculoskeletal disease or disorder by administering a therapeutically affective amount of a pharmaceutical composition comprising a CRISPR gene-editing system targeting the NTRK11 gene, as described herein, to a subject in need thereof. In some embodiments, the musculoskeletal disease or disorder is Arthritis, Infectious Intermittent joint effusion, Ankylosing spondylitis, Arthritis, Osteoarthritis, Spondylarthritis, Plantar fasciitis, Degenerative polyarthritis, Hemophilic arthropathy, Inflammatory myopathy with abundant macrophages, or Polymyositis.

[0842] In yet other embodiments, a method is provided for treating an inflammatory disease or disorder by administering a therapeutically affective amount of a pharmaceutical composition comprising a CRISPR gene-editing system targeting the NTRK11 gene, as described herein, to a subject in need thereof. In some embodiments, the inflammatory disease or disorder is Autoinflammatory Disease (AID), Cryopyrin Associated Periodic syndrome (CAPS), Familial Mediterranean Fever (FMF), TNF-Receptor Associated Periodic Syndrome (TRAPS), Hyper-IgD Syndrome (HIDS), Systemic Lupus Erythematosus (SLE), or Fibrosis (general).

[0843] In certain embodiments, any region of an NTRK1 gene (e.g., 5′ untranslated region [UTR], exon 1, exon 2, exon 3, exon 4, exon 5, exon 6, exon 7, exon 8, exon 9, exon 10, exon 11, exon 12, exon 13, exon 14, exon 15, exon 16, exon 17, exon 18, exon 19, any intervening intronic regions, intron/exon junctions, the 3′ UTR, or polyadenylation signal) is targeted by an RNA-guided nuclease to alter the gene. In some embodiments, the NTRK1 gene targeted by an RNA-guided nuclease is from a mammal. In some embodiments, the NTRK1 gene targeted by an RNA-guided nuclease is from a human (hNTRK1). In some embodiments, the NTRK11 gene targeted by an RNA-guided nuclease is from a dog (cNTRK1). In some embodiments, the NTRK1 gene targeted by an RNA-guided nuclease is from a horse (eNTRK1). In some embodiments, the NTRK1 gene targeted by an RNA-guided nuclease is from a cat (fNTRK1).

### LLL. NTRK2

[0844] In one aspect, methods and pharmaceutical compositions are provided for treating a back or spine condition or disorder by administering a therapeutically effective amount of a CRISPR pharmaceutical composition that targets an NTRK2 gene to a subject in need thereof. In some embodiments, the CRISPR pharmaceutical composition comprises an RNA-guided nuclease and an sgRNA targeting the NTRK2 gene with a crRNA sequence selected from SEQ ID NOs: 1795-1842. In some embodiments, the crRNA sequence is selected from SEQ ID NOs: 1795-1819. In some embodiments, the crRNA sequence is selected from 1795-1804. In some embodiments, the RNA-guided nuclease is a Cas9 protein. In some embodiments, the Cas9 protein is an S. pyogenes Cas9 protein. In some embodiments, the S. pyogenes Cas9 protein comprises K848A, K1003A, and R1060A amino acid substitutions relative to the SpCas9 sequence of NCBI accession number 7S37_P. In some embodiments, the S. pyogenes Cas9 protein comprises an R691A amino acid substitution relative to the SpCas9 sequence of NCBI accession number 7S37_P.

[0845] In some embodiments, the CRISPR gene-editing system targeting the NTRK2 gene is delivered to a mammalian cell via viral vector. In some embodiments, the CRISPR gene-editing system targeting the NTRK2 gene is delivered to a mammalian cell via an AAV vector. In some embodiments, the CRISPR gene-editing system targeting the NTRK2 gene is delivered to a mammalian cell via a lentiviral vector. In some embodiments, the CRISPR gene-editing system targeting the NTRK2 gene is delivered to a mammalian cell via a lipid nanoparticle. In some embodiments, the CRISPR gene-editing system targeting the NTRK2 gene is delivered to a mammalian cell via a virus-like particle. In some embodiments, the CRISPR gene-editing system targeting the NTRK2 gene is delivered to a mammalian cell via a liposome. In some embodiments, the CRISPR gene-editing system targeting the NTRK2 gene is delivered to a mammalian cell via a lipid nanocrystal.

[0846] In some embodiments, the pharmaceutical composition comprises an sgRNA having a crRNA sequence selected from SEQ ID NOs: 1795-1842 and a S. pyogenes Cas9 protein, optionally comprising K848A, K1003A, and R1060A amino acid substitutions or an R691A amino acid substitution, encapsulated in i) a viral vector selected from an AAV vector and a lentiviral vector; ii) a lipid nanoparticle; iii) a virus-like particle; iv) a liposome; or v) a lipid nanocrystal. In some embodiments, the pharmaceutical composition comprises an sgRNA having a crRNA sequence selected from SEQ ID NOs: 1795-1842 and a S. pyogenes Cas9 protein encapsulated in a lipid nanoparticle.

[0847] In various embodiments, the pharmaceutical composition comprising a CRISPR gene-editing system targeting the NTRK2 gene is used in a method of treating a mammal in need thereof. In some embodiments, the method treats a discogenic disease or disorder. In some embodiments, the discogenic disease or disorder is low back pain, neck pain, lumbar pain, degenerative disc disease, discogenic pain annual ligament tear, herniated disc, spinal facet joint arthritis, intervertebral disc disease, spondylosis, painful scoliosis, or spinal stenosis. In some embodiments, the discogenic disease or disorder is discogenic pain.

[0848] In some embodiments, a method is provided for treating a discogenic disease or disorder by administering a therapeutically affective amount of a pharmaceutical composition comprising a CRISPR gene-editing system targeting the NTRK2 gene, as described herein, to a subject in need thereof. In some embodiments, the pharmaceutical composition comprises an LNP encapsuling an sgRNA having a crRNA sequence selected from SEQ ID NOs: 1795-1842 and a S. pyogenes Cas9 protein. In some embodiments, the crRNA sequence is selected from SEQ ID NOs: 1795-1819. In some embodiments, the crRNA sequence is selected from SEQ ID NOs: 1795-1804. In some embodiments, the pharmaceutical composition is administered by intradiscal injection.

[0849] In some embodiments, a method is provided for treating a musculoskeletal disease or disorder by administering a therapeutically affective amount of a pharmaceutical composition comprising a CRISPR gene-editing system targeting the NTRK2 gene, as described herein, to a subject in need thereof. In some embodiments, the musculoskeletal disease or disorder is Arthritis, Infectious Intermittent joint effusion, Ankylosing spondylitis, Arthritis, Osteoarthritis, Spondylarthritis, Plantar fasciitis, Degenerative polyarthritis, Hemophilic arthropathy, Inflammatory myopathy with abundant macrophages, or Polymyositis.

[0850] In yet other embodiments, a method is provided for treating an inflammatory disease or disorder by administering a therapeutically affective amount of a pharmaceutical composition comprising a CRISPR gene-editing system targeting the NTRK2 gene, as described herein, to a subject in need thereof. In some embodiments, the inflammatory disease or disorder is Autoinflammatory Disease (AID), Cryopyrin Associated Periodic syndrome (CAPS), Familial Mediterranean Fever (FMF), TNF-Receptor Associated Periodic Syndrome (TRAPS), Hyper-IgD Syndrome (HIDS), Systemic Lupus Erythematosus (SLE), or Fibrosis (general).

[0851] In certain embodiments, any region of an NTRK2 gene (e.g., 5′ untranslated region [UTR], exon 1, exon 2, exon 3, exon 4, exon 5, exon 6, exon 7, exon 8, exon 9, exon 10, exon 11, exon 12, exon 13, exon 14, exon 15, exon 16, exon 17, exon 18, exon 19, exon 20, exon 21, exon 22, exon 23, exon 24, exon 25, exon 26, exon 27, exon 28, any intervening intronic regions, intron/exon junctions, the 3′ UTR, or polyadenylation signal) is targeted by an RNA-guided nuclease to alter the gene. In some embodiments, the NTRK2 gene targeted by an RNA-guided nuclease is from a mammal. In some embodiments, the NTRK2 gene targeted by an RNA-guided nuclease is from a human (hNTRK2). In some embodiments, the NTRK2 gene targeted by an RNA-guided nuclease is from a dog (cNTRK2). In some embodiments, the NTRK2 gene targeted by an RNA-guided nuclease is from a horse (eNTRK2). In some embodiments, the NTRK2 gene targeted by an RNA-guided nuclease is from a cat (fNTRK2).

### MMM. BDNF

[0852] In one aspect, methods and pharmaceutical compositions are provided for treating a back or spine condition or disorder by administering a therapeutically effective amount of a CRISPR pharmaceutical composition that targets an BDNF gene to a subject in need thereof. In some embodiments, the CRISPR pharmaceutical composition comprises an RNA-guided nuclease and an sgRNA targeting the BDNF gene with a crRNA sequence selected from SEQ ID NOs: 240-287. In some embodiments, the crRNA sequence is selected from SEQ ID NOs: 240-264. In some embodiments, the crRNA sequence is selected from 240-249. In some embodiments, the RNA-guided nuclease is a Cas9 protein. In some embodiments, the Cas9 protein is an S. pyogenes Cas9 protein. In some embodiments, the S. pyogenes Cas9 protein comprises K848A, K1003A, and R1060A amino acid substitutions relative to the SpCas9 sequence of NCBI accession number 7S37_P. In some embodiments, the S. pyogenes Cas9 protein comprises an R691A amino acid substitution relative to the SpCas9 sequence of NCBI accession number 7S37_P.

[0853] In some embodiments, the CRISPR gene-editing system targeting the BDNF gene is delivered to a mammalian cell via viral vector. In some embodiments, the CRISPR gene-editing system targeting the BDNF gene is delivered to a mammalian cell via an AAV vector. In some embodiments, the CRISPR gene-editing system targeting the BDNF gene is delivered to a mammalian cell via a lentiviral vector. In some embodiments, the CRISPR gene-editing system targeting the BDNF gene is delivered to a mammalian cell via a lipid nanoparticle. In some embodiments, the CRISPR gene-editing system targeting the BDNF gene is delivered to a mammalian cell via a virus-like particle. In some embodiments, the CRISPR gene-editing system targeting the BDNF gene is delivered to a mammalian cell via a liposome. In some embodiments, the CRISPR gene-editing system targeting the BDNF gene is delivered to a mammalian cell via a lipid nanocrystal.

[0854] In some embodiments, the pharmaceutical composition comprises an sgRNA having a crRNA sequence selected from SEQ ID NOs: 241-281 and a S. pyogenes Cas9 protein, optionally comprising K848A, K1003A, and R1060A amino acid substitutions or an R691A amino acid substitution, encapsulated in i) a viral vector selected from an AAV vector and a lentiviral vector; ii) a lipid nanoparticle; iii) a virus-like particle; iv) a liposome; or v) a lipid nanocrystal. In some embodiments, the pharmaceutical composition comprises an sgRNA having a crRNA sequence selected from SEQ ID NOs: 241-281 and a S. pyogenes Cas9 protein encapsulated in a lipid nanoparticle.

[0855] In various embodiments, the pharmaceutical composition comprising a CRISPR gene-editing system targeting the BDNF gene is used in a method of treating a mammal in need thereof. In some embodiments, the method treats a discogenic disease or disorder. In some embodiments, the discogenic disease or disorder is low back pain, neck pain, lumbar pain, degenerative disc disease, discogenic pain annual ligament tear, herniated disc, spinal facet joint arthritis, intervertebral disc disease, spondylosis, painful scoliosis, or spinal stenosis. In some embodiments, the discogenic disease or disorder is discogenic pain.

[0856] In some embodiments, a method is provided for treating a discogenic disease or disorder by administering a therapeutically affective amount of a pharmaceutical composition comprising a CRISPR gene-editing system targeting the BDNF gene, as described herein, to a subject in need thereof. In some embodiments, the pharmaceutical composition comprises an LNP encapsuling an sgRNA having a crRNA sequence selected from SEQ ID NOs: 241-281 and a S. pyogenes Cas9 protein. In some embodiments, the crRNA sequence is selected from SEQ ID NOs: 241-265. In some embodiments, the crRNA sequence is selected from SEQ ID NOs: 241-250. In some embodiments, the pharmaceutical composition is administered by intradiscal injection.

[0857] In some embodiments, a method is provided for treating a musculoskeletal disease or disorder by administering a therapeutically affective amount of a pharmaceutical composition comprising a CRISPR gene-editing system targeting the BDNF gene, as described herein, to a subject in need thereof. In some embodiments, the musculoskeletal disease or disorder is Arthritis, Infectious Intermittent joint effusion, Ankylosing spondylitis, Arthritis, Osteoarthritis, Spondylarthritis, Plantar fasciitis, Degenerative polyarthritis, Hemophilic arthropathy, Inflammatory myopathy with abundant macrophages, or Polymyositis.

[0858] In yet other embodiments, a method is provided for treating an inflammatory disease or disorder by administering a therapeutically affective amount of a pharmaceutical composition comprising a CRISPR gene-editing system targeting the BDNF gene, as described herein, to a subject in need thereof. In some embodiments, the inflammatory disease or disorder is Autoinflammatory Disease (AID), Cryopyrin Associated Periodic syndrome (CAPS), Familial Mediterranean Fever (FMF), TNF-Receptor Associated Periodic Syndrome (TRAPS), Hyper-IgD Syndrome (HIDS), Systemic Lupus Erythematosus (SLE), or Fibrosis (general).

[0859] In certain embodiments, any region of an BDNF gene (e.g., 5′ untranslated region [UTR], exon 1, exon 2, exon 3, exon 4, exon 5, exon 6, exon 7, exon 8, exon 9, exon 10, exon 11, exon 12, any intervening intronic regions, intron/exon junctions, the 3′ UTR, or polyadenylation signal) is targeted by an RNA-guided nuclease to alter the gene. In some embodiments, the BDNF gene targeted by an RNA-guided nuclease is from a mammal. In some embodiments, the BDNF gene targeted by an RNA-guided nuclease is from a human (hBDNF). In some embodiments, the BDNF gene targeted by an RNA-guided nuclease is from a dog (cBDNF). In some embodiments, the BDNF gene targeted by an RNA-guided nuclease is from a horse (eBDNF). In some embodiments, the BDNF gene targeted by an RNA-guided nuclease is from a cat (fBDNF).

### NNN. TAC1

[0860] In one aspect, methods and pharmaceutical compositions are provided for treating a back or spine condition or disorder by administering a therapeutically effective amount of a CRISPR pharmaceutical composition that targets an TACT gene to a subject in need thereof. In some embodiments, the CRISPR pharmaceutical composition comprises an RNA-guided nuclease and an sgRNA targeting the TACT gene with a crRNA sequence selected from SEQ ID NOs: 2292-2308. In some embodiments, the crRNA sequence is selected from 2292-2301. In some embodiments, the RNA-guided nuclease is a Cas9 protein. In some embodiments, the Cas9 protein is an S. pyogenes Cas9 protein. In some embodiments, the S. pyogenes Cas9 protein comprises K848A, K1003A, and R1060A amino acid substitutions relative to the SpCas9 sequence of NCBI accession number 7S37_P. In some embodiments, the S. pyogenes Cas9 protein comprises an R691A amino acid substitution relative to the SpCas9 sequence of NCBI accession number 7S37_P.

[0861] In some embodiments, the CRISPR gene-editing system targeting the TAC1 gene is delivered to a mammalian cell via viral vector. In some embodiments, the CRISPR gene-editing system targeting the TACT gene is delivered to a mammalian cell via an AAV vector. In some embodiments, the CRISPR gene-editing system targeting the TACT gene is delivered to a mammalian cell via a lentiviral vector. In some embodiments, the CRISPR gene-editing system targeting the TACT gene is delivered to a mammalian cell via a lipid nanoparticle. In some embodiments, the CRISPR gene-editing system targeting the TACT gene is delivered to a mammalian cell via a virus-like particle. In some embodiments, the CRISPR gene-editing system targeting the TACT gene is delivered to a mammalian cell via a liposome. In some embodiments, the CRISPR gene-editing system targeting the TACT gene is delivered to a mammalian cell via a lipid nanocrystal.

[0862] In some embodiments, the pharmaceutical composition comprises an sgRNA having a crRNA sequence selected from SEQ ID NOs: 2292-2308 and a S. pyogenes Cas9 protein, optionally comprising K848A, K1003A, and R1060A amino acid substitutions or an R691A amino acid substitution, encapsulated in i) a viral vector selected from an AAV vector and a lentiviral vector; ii) a lipid nanoparticle; iii) a virus-like particle; iv) a liposome; or v) a lipid nanocrystal. In some embodiments, the pharmaceutical composition comprises an sgRNA having a crRNA sequence selected from SEQ ID NOs: 2292-2308 and a S. pyogenes Cas9 protein encapsulated in a lipid nanoparticle.

[0863] In various embodiments, the pharmaceutical composition comprising a CRISPR gene-editing system targeting the TACT gene is used in a method of treating a mammal in need thereof. In some embodiments, the method treats a discogenic disease or disorder. In some embodiments, the discogenic disease or disorder is low back pain, neck pain, lumbar pain, degenerative disc disease, discogenic pain annual ligament tear, herniated disc, spinal facet joint arthritis, intervertebral disc disease, spondylosis, painful scoliosis, or spinal stenosis. In some embodiments, the discogenic disease or disorder is discogenic pain.

[0864] In some embodiments, a method is provided for treating a discogenic disease or disorder by administering a therapeutically affective amount of a pharmaceutical composition comprising a CRISPR gene-editing system targeting the TAC1 gene, as described herein, to a subject in need thereof. In some embodiments, the pharmaceutical composition comprises an LNP encapsuling an sgRNA having a crRNA sequence selected from SEQ ID NOs: 2292-2308 and a S. pyogenes Cas9 protein. In some embodiments, the crRNA sequence is selected from SEQ ID NOs: 2292-2301. In some embodiments, the pharmaceutical composition is administered by intradiscal injection.

[0865] In some embodiments, a method is provided for treating a musculoskeletal disease or disorder by administering a therapeutically affective amount of a pharmaceutical composition comprising a CRISPR gene-editing system targeting the TAC1 gene, as described herein, to a subject in need thereof. In some embodiments, the musculoskeletal disease or disorder is Arthritis, Infectious Intermittent joint effusion, Ankylosing spondylitis, Arthritis, Osteoarthritis, Spondylarthritis, Plantar fasciitis, Degenerative polyarthritis, Hemophilic arthropathy, Inflammatory myopathy with abundant macrophages, or Polymyositis.

[0866] In yet other embodiments, a method is provided for treating an inflammatory disease or disorder by administering a therapeutically affective amount of a pharmaceutical composition comprising a CRISPR gene-editing system targeting the TAC1 gene, as described herein, to a subject in need thereof. In some embodiments, the inflammatory disease or disorder is Autoinflammatory Disease (AID), Cryopyrin Associated Periodic syndrome (CAPS), Familial Mediterranean Fever (FMF), TNF-Receptor Associated Periodic Syndrome (TRAPS), Hyper-IgD Syndrome (HIDS), Systemic Lupus Erythematosus (SLE), or Fibrosis (general).

[0867] In certain embodiments, any region of an TAC1 gene (e.g., 5′ untranslated region [UTR], exon 1, exon 2, exon 3, exon 4, exon 5, exon 6, exon 7, exon 8, any intervening intronic regions, intron/exon junctions, the 3′ UTR, or polyadenylation signal) is targeted by an RNA-guided nuclease to alter the gene. In some embodiments, the TAC1 gene targeted by an RNA-guided nuclease is from a mammal. In some embodiments, the TAC1 gene targeted by an RNA-guided nuclease is from a human (hTAC1). In some embodiments, the TAC1 gene targeted by an RNA-guided nuclease is from a dog (cTAC1). In some embodiments, the TAC1 gene targeted by an RNA-guided nuclease is from a horse (eTAC1). In some embodiments, the TAC1 gene targeted by an RNA-guided nuclease is from a cat (fTAC1).

### OOO. TAC3

[0868] In one aspect, methods and pharmaceutical compositions are provided for treating a back or spine condition or disorder by administering a therapeutically effective amount of a CRISPR pharmaceutical composition that targets an TAC3 gene to a subject in need thereof. In some embodiments, the CRISPR pharmaceutical composition comprises an RNA-guided nuclease and an sgRNA targeting the TAC3 gene with a crRNA sequence selected from SEQ ID NOs: 2309-2325. In some embodiments, the crRNA sequence is selected from 2309-2318. In some embodiments, the RNA-guided nuclease is a Cas9 protein. In some embodiments, the Cas9 protein is an S. pyogenes Cas9 protein. In some embodiments, the S. pyogenes Cas9 protein comprises K848A, K1003A, and R1060A amino acid substitutions relative to the SpCas9 sequence of NCBI accession number 7S37_P. In some embodiments, the S. pyogenes Cas9 protein comprises an R691A amino acid substitution relative to the SpCas9 sequence of NCBI accession number 7S37_P.

[0869] In some embodiments, the CRISPR gene-editing system targeting the TAC3 gene is delivered to a mammalian cell via viral vector. In some embodiments, the CRISPR gene-editing system targeting the TAC3 gene is delivered to a mammalian cell via an AAV vector. In some embodiments, the CRISPR gene-editing system targeting the TAC3 gene is delivered to a mammalian cell via a lentiviral vector. In some embodiments, the CRISPR gene-editing system targeting the TAC3 gene is delivered to a mammalian cell via a lipid nanoparticle. In some embodiments, the CRISPR gene-editing system targeting the TAC3 gene is delivered to a mammalian cell via a virus-like particle. In some embodiments, the CRISPR gene-editing system targeting the TAC3 gene is delivered to a mammalian cell via a liposome. In some embodiments, the CRISPR gene-editing system targeting the TAC3 gene is delivered to a mammalian cell via a lipid nanocrystal.

[0870] In some embodiments, the pharmaceutical composition comprises an sgRNA having a crRNA sequence selected from SEQ ID NOs: 2309-2325 and a S. pyogenes Cas9 protein, optionally comprising K848A, K1003A, and R1060A amino acid substitutions or an R691A amino acid substitution, encapsulated in i) a viral vector selected from an AAV vector and a lentiviral vector; ii) a lipid nanoparticle; iii) a virus-like particle; iv) a liposome; or v) a lipid nanocrystal. In some embodiments, the pharmaceutical composition comprises an sgRNA having a crRNA sequence selected from SEQ ID NOs: 2309-2325 and a S. pyogenes Cas9 protein encapsulated in a lipid nanoparticle.

[0871] In various embodiments, the pharmaceutical composition comprising a CRISPR gene-editing system targeting the TAC3 gene is used in a method of treating a mammal in need thereof. In some embodiments, the method treats a discogenic disease or disorder. In some embodiments, the discogenic disease or disorder is low back pain, neck pain, lumbar pain, degenerative disc disease, discogenic pain annual ligament tear, herniated disc, spinal facet joint arthritis, intervertebral disc disease, spondylosis, painful scoliosis, or spinal stenosis. In some embodiments, the discogenic disease or disorder is discogenic pain.

[0872] In some embodiments, a method is provided for treating a discogenic disease or disorder by administering a therapeutically affective amount of a pharmaceutical composition comprising a CRISPR gene-editing system targeting the TAC3 gene, as described herein, to a subject in need thereof. In some embodiments, the pharmaceutical composition comprises an LNP encapsuling an sgRNA having a crRNA sequence selected from SEQ ID NOs: 2309-2325 and a S. pyogenes Cas9 protein. In some embodiments, the crRNA sequence is selected from SEQ ID NOs: 2309-2318. In some embodiments, the pharmaceutical composition is administered by intradiscal injection.

[0873] In some embodiments, a method is provided for treating a musculoskeletal disease or disorder by administering a therapeutically affective amount of a pharmaceutical composition comprising a CRISPR gene-editing system targeting the TAC3 gene, as described herein, to a subject in need thereof. In some embodiments, the musculoskeletal disease or disorder is Arthritis, Infectious Intermittent joint effusion, Ankylosing spondylitis, Arthritis, Osteoarthritis, Spondylarthritis, Plantar fasciitis, Degenerative polyarthritis, Hemophilic arthropathy, Inflammatory myopathy with abundant macrophages, or Polymyositis.

[0874] In yet other embodiments, a method is provided for treating an inflammatory disease or disorder by administering a therapeutically affective amount of a pharmaceutical composition comprising a CRISPR gene-editing system targeting the TAC3 gene, as described herein, to a subject in need thereof. In some embodiments, the inflammatory disease or disorder is Autoinflammatory Disease (AID), Cryopyrin Associated Periodic syndrome (CAPS), Familial Mediterranean Fever (FMF), TNF-Receptor Associated Periodic Syndrome (TRAPS), Hyper-IgD Syndrome (HIDS), Systemic Lupus Erythematosus (SLE), or Fibrosis (general).

[0875] In certain embodiments, any region of an TAC3 gene (e.g., 5′ untranslated region [UTR], exon 1, exon 2, exon 3, exon 4, exon 5, exon 6, exon 7, exon 8, exon 9, exon 10, exon 11, exon 12, exon 13, exon 14, exon 15, exon 16, exon 17, exon 18, exon 19, exon 20, exon 21, exon 22, exon 23, exon 24, exon 25, exon 26, exon 27, exon 28, exon 29, exon 30, exon 31, any intervening intronic regions, intron/exon junctions, the 3′ UTR, or polyadenylation signal) is targeted by an RNA-guided nuclease to alter the gene. In some embodiments, the TAC3 gene targeted by an RNA-guided nuclease is from a mammal. In some embodiments, the TAC3 gene targeted by an RNA-guided nuclease is from a human (hTAC3). In some embodiments, the TAC3 gene targeted by an RNA-guided nuclease is from a dog (cTAC3). In some embodiments, the TAC3 gene targeted by an RNA-guided nuclease is from a horse (eTAC3). In some embodiments, the TAC3 gene targeted by an RNA-guided nuclease is from a cat (fTAC3).

### PPP. TACR1

[0876] In one aspect, methods and pharmaceutical compositions are provided for treating a back or spine condition or disorder by administering a therapeutically effective amount of a CRISPR pharmaceutical composition that targets an TACR1 gene to a subject in need thereof. In some embodiments, the CRISPR pharmaceutical composition comprises an RNA-guided nuclease and an sgRNA targeting the TACR1 gene with a crRNA sequence selected from SEQ ID NOs: 2326-2373. In some embodiments, the crRNA sequence is selected from SEQ ID NOs: 2326-2350. In some embodiments, the crRNA sequence is selected from 2326-2335. In some embodiments, the RNA-guided nuclease is a Cas9 protein. In some embodiments, the Cas9 protein is an S. pyogenes Cas9 protein. In some embodiments, the S. pyogenes Cas9 protein comprises K848A, K1003A, and R1060A amino acid substitutions relative to the SpCas9 sequence of NCBI accession number 7S37_P. In some embodiments, the S. pyogenes Cas9 protein comprises an R691A amino acid substitution relative to the SpCas9 sequence of NCBI accession number 7S37_P.

[0877] In some embodiments, the CRISPR gene-editing system targeting the TACR1 gene is delivered to a mammalian cell via viral vector. In some embodiments, the CRISPR gene-editing system targeting the TACR1 gene is delivered to a mammalian cell via an AAV vector. In some embodiments, the CRISPR gene-editing system targeting the TACR1 gene is delivered to a mammalian cell via a lentiviral vector. In some embodiments, the CRISPR gene-editing system targeting the TACR1 gene is delivered to a mammalian cell via a lipid nanoparticle. In some embodiments, the CRISPR gene-editing system targeting the TACR1 gene is delivered to a mammalian cell via a virus-like particle. In some embodiments, the CRISPR gene-editing system targeting the TACR1 gene is delivered to a mammalian cell via a liposome. In some embodiments, the CRISPR gene-editing system targeting the TACR1 gene is delivered to a mammalian cell via a lipid nanocrystal.

[0878] In some embodiments, the pharmaceutical composition comprises an sgRNA having a crRNA sequence selected from SEQ ID NOs: 2326-2373 and a S. pyogenes Cas9 protein, optionally comprising K848A, K1003A, and R1060A amino acid substitutions or an R691A amino acid substitution, encapsulated in i) a viral vector selected from an AAV vector and a lentiviral vector; ii) a lipid nanoparticle; iii) a virus-like particle; iv) a liposome; or v) a lipid nanocrystal. In some embodiments, the pharmaceutical composition comprises an sgRNA having a crRNA sequence selected from SEQ ID NOs: 2326-2373 and a S. pyogenes Cas9 protein encapsulated in a lipid nanoparticle.

[0879] In various embodiments, the pharmaceutical composition comprising a CRISPR gene-editing system targeting the TACR1 gene is used in a method of treating a mammal in need thereof. In some embodiments, the method treats a discogenic disease or disorder. In some embodiments, the discogenic disease or disorder is low back pain, neck pain, lumbar pain, degenerative disc disease, discogenic pain annual ligament tear, herniated disc, spinal facet joint arthritis, intervertebral disc disease, spondylosis, painful scoliosis, or spinal stenosis. In some embodiments, the discogenic disease or disorder is discogenic pain.

[0880] In some embodiments, a method is provided for treating a discogenic disease or disorder by administering a therapeutically affective amount of a pharmaceutical composition comprising a CRISPR gene-editing system targeting the TACR1 gene, as described herein, to a subject in need thereof. In some embodiments, the pharmaceutical composition comprises an LNP encapsuling an sgRNA having a crRNA sequence selected from SEQ ID NOs: 2326-2373 and a S. pyogenes Cas9 protein. In some embodiments, the crRNA sequence is selected from SEQ ID NOs: 2326-2350. In some embodiments, the crRNA sequence is selected from SEQ ID NOs: 2326-2335. In some embodiments, the pharmaceutical composition is administered by intradiscal injection.

[0881] In some embodiments, a method is provided for treating a musculoskeletal disease or disorder by administering a therapeutically affective amount of a pharmaceutical composition comprising a CRISPR gene-editing system targeting the TACR1 gene, as described herein, to a subject in need thereof. In some embodiments, the musculoskeletal disease or disorder is Arthritis, Infectious Intermittent joint effusion, Ankylosing spondylitis, Arthritis, Osteoarthritis, Spondylarthritis, Plantar fasciitis, Degenerative polyarthritis, Hemophilic arthropathy, Inflammatory myopathy with abundant macrophages, or Polymyositis.

[0882] In yet other embodiments, a method is provided for treating an inflammatory disease or disorder by administering a therapeutically affective amount of a pharmaceutical composition comprising a CRISPR gene-editing system targeting the TACR1 gene, as described herein, to a subject in need thereof. In some embodiments, the inflammatory disease or disorder is Autoinflammatory Disease (AID), Cryopyrin Associated Periodic syndrome (CAPS), Familial Mediterranean Fever (FMF), TNF-Receptor Associated Periodic Syndrome (TRAPS), Hyper-IgD Syndrome (HIDS), Systemic Lupus Erythematosus (SLE), or Fibrosis (general).

[0883] In certain embodiments, any region of an TACR1 gene (e.g., 5′ untranslated region [UTR], exon 1, exon 2, exon 3, exon 4, exon 5, any intervening intronic regions, intron/exon junctions, the 3′ UTR, or polyadenylation signal) is targeted by an RNA-guided nuclease to alter the gene. In some embodiments, the TACR1 gene targeted by an RNA-guided nuclease is from a mammal. In some embodiments, the TACR1 gene targeted by an RNA-guided nuclease is from a human (hTACR1). In some embodiments, the TACR1 gene targeted by an RNA-guided nuclease is from a dog (cTACR1). In some embodiments, the TACR1 gene targeted by an RNA-guided nuclease is from a horse (eTACR1). In some embodiments, the TACR1 gene targeted by an RNA-guided nuclease is from a cat (fTACR1).

### QQQ. TACR2

[0884] In one aspect, methods and pharmaceutical compositions are provided for treating a back or spine condition or disorder by administering a therapeutically effective amount of a CRISPR pharmaceutical composition that targets an TACR2 gene to a subject in need thereof. In some embodiments, the CRISPR pharmaceutical composition comprises an RNA-guided nuclease and an sgRNA targeting the TACR2 gene with a crRNA sequence selected from SEQ ID NOs: 2374-2421. In some embodiments, the crRNA sequence is selected from SEQ ID NOs: 2374-2398. In some embodiments, the crRNA sequence is selected from 2374-2383. In some embodiments, the RNA-guided nuclease is a Cas9 protein. In some embodiments, the Cas9 protein is an S. pyogenes Cas9 protein. In some embodiments, the S. pyogenes Cas9 protein comprises K848A, K1003A, and R1060A amino acid substitutions relative to the SpCas9 sequence of NCBI accession number 7S37_P. In some embodiments, the S. pyogenes Cas9 protein comprises an R691A amino acid substitution relative to the SpCas9 sequence of NCBI accession number 7S37_P.

[0885] In some embodiments, the CRISPR gene-editing system targeting the TACR2 gene is delivered to a mammalian cell via viral vector. In some embodiments, the CRISPR gene-editing system targeting the TACR2 gene is delivered to a mammalian cell via an AAV vector. In some embodiments, the CRISPR gene-editing system targeting the TACR2 gene is delivered to a mammalian cell via a lentiviral vector. In some embodiments, the CRISPR gene-editing system targeting the TACR2 gene is delivered to a mammalian cell via a lipid nanoparticle. In some embodiments, the CRISPR gene-editing system targeting the TACR2 gene is delivered to a mammalian cell via a virus-like particle. In some embodiments, the CRISPR gene-editing system targeting the TACR2 gene is delivered to a mammalian cell via a liposome. In some embodiments, the CRISPR gene-editing system targeting the TACR2 gene is delivered to a mammalian cell via a lipid nanocrystal.

[0886] In some embodiments, the pharmaceutical composition comprises an sgRNA having a crRNA sequence selected from SEQ ID NOs: 2374-2421 and a S. pyogenes Cas9 protein, optionally comprising K848A, K1003A, and R1060A amino acid substitutions or an R691A amino acid substitution, encapsulated in i) a viral vector selected from an AAV vector and a lentiviral vector; ii) a lipid nanoparticle; iii) a virus-like particle; iv) a liposome; or v) a lipid nanocrystal. In some embodiments, the pharmaceutical composition comprises an sgRNA having a crRNA sequence selected from SEQ ID NOs: 2374-2421 and a S. pyogenes Cas9 protein encapsulated in a lipid nanoparticle.

[0887] In various embodiments, the pharmaceutical composition comprising a CRISPR gene-editing system targeting the TACR2 gene is used in a method of treating a mammal in need thereof. In some embodiments, the method treats a discogenic disease or disorder. In some embodiments, the discogenic disease or disorder is low back pain, neck pain, lumbar pain, degenerative disc disease, discogenic pain annual ligament tear, herniated disc, spinal facet joint arthritis, intervertebral disc disease, spondylosis, painful scoliosis, or spinal stenosis. In some embodiments, the discogenic disease or disorder is discogenic pain.

[0888] In some embodiments, a method is provided for treating a discogenic disease or disorder by administering a therapeutically affective amount of a pharmaceutical composition comprising a CRISPR gene-editing system targeting the TACR2 gene, as described herein, to a subject in need thereof. In some embodiments, the pharmaceutical composition comprises an LNP encapsuling an sgRNA having a crRNA sequence selected from SEQ ID NOs: 2374-2421 and a S. pyogenes Cas9 protein. In some embodiments, the crRNA sequence is selected from SEQ ID NOs: 2374-2398. In some embodiments, the crRNA sequence is selected from SEQ ID NOs: 2374-2483. In some embodiments, the pharmaceutical composition is administered by intradiscal injection.

[0889] In some embodiments, a method is provided for treating a musculoskeletal disease or disorder by administering a therapeutically affective amount of a pharmaceutical composition comprising a CRISPR gene-editing system targeting the TACR2 gene, as described herein, to a subject in need thereof. In some embodiments, the musculoskeletal disease or disorder is Arthritis, Infectious Intermittent joint effusion, Ankylosing spondylitis, Arthritis, Osteoarthritis, Spondylarthritis, Plantar fasciitis, Degenerative polyarthritis, Hemophilic arthropathy, Inflammatory myopathy with abundant macrophages, or Polymyositis.

[0890] In yet other embodiments, a method is provided for treating an inflammatory disease or disorder by administering a therapeutically affective amount of a pharmaceutical composition comprising a CRISPR gene-editing system targeting the TACR2 gene, as described herein, to a subject in need thereof. In some embodiments, the inflammatory disease or disorder is Autoinflammatory Disease (AID), Cryopyrin Associated Periodic syndrome (CAPS), Familial Mediterranean Fever (FMF), TNF-Receptor Associated Periodic Syndrome (TRAPS), Hyper-IgD Syndrome (HIDS), Systemic Lupus Erythematosus (SLE), or Fibrosis (general).

[0891] In certain embodiments, any region of an TACR2 gene (e.g., 5′ untranslated region [UTR], exon 1, exon 2, exon 3, exon 4, exon 5, exon 6, any intervening intronic regions, intron/exon junctions, the 3′ UTR, or polyadenylation signal) is targeted by an RNA-guided nuclease to alter the gene. In some embodiments, the TACR2 gene targeted by an RNA-guided nuclease is from a mammal. In some embodiments, the TACR2 gene targeted by an RNA-guided nuclease is from a human (hTACR2). In some embodiments, the TACR2 gene targeted by an RNA-guided nuclease is from a dog (cTACR2). In some embodiments, the TACR2 gene targeted by an RNA-guided nuclease is from a horse (eTACR2). In some embodiments, the TACR2 gene targeted by an RNA-guided nuclease is from a cat (fTACR2).

### RRR. TACR3

[0892] In one aspect, methods and pharmaceutical compositions are provided for treating a back or spine condition or disorder by administering a therapeutically effective amount of a CRISPR pharmaceutical composition that targets an TACR3 gene to a subject in need thereof. In some embodiments, the CRISPR pharmaceutical composition comprises an RNA-guided nuclease and an sgRNA targeting the TACR3 gene with a crRNA sequence selected from SEQ ID NOs: 2422-2469. In some embodiments, the crRNA sequence is selected from SEQ ID NOs: 2422-2446. In some embodiments, the crRNA sequence is selected from 2422-2431. In some embodiments, the RNA-guided nuclease is a Cas9 protein. In some embodiments, the Cas9 protein is an S. pyogenes Cas9 protein. In some embodiments, the S. pyogenes Cas9 protein comprises K848A, K1003A, and R1060A amino acid substitutions relative to the SpCas9 sequence of NCBI accession number 7S37_P. In some embodiments, the S. pyogenes Cas9 protein comprises an R691A amino acid substitution relative to the SpCas9 sequence of NCBI accession number 7S37_P.

[0893] In some embodiments, the CRISPR gene-editing system targeting the TACR3 gene is delivered to a mammalian cell via viral vector. In some embodiments, the CRISPR gene-editing system targeting the TACR3 gene is delivered to a mammalian cell via an AAV vector. In some embodiments, the CRISPR gene-editing system targeting the TACR3 gene is delivered to a mammalian cell via a lentiviral vector. In some embodiments, the CRISPR gene-editing system targeting the TACR3 gene is delivered to a mammalian cell via a lipid nanoparticle. In some embodiments, the CRISPR gene-editing system targeting the TACR3 gene is delivered to a mammalian cell via a virus-like particle. In some embodiments, the CRISPR gene-editing system targeting the TACR3 gene is delivered to a mammalian cell via a liposome. In some embodiments, the CRISPR gene-editing system targeting the TACR3 gene is delivered to a mammalian cell via a lipid nanocrystal.

[0894] In some embodiments, the pharmaceutical composition comprises an sgRNA having a crRNA sequence selected from SEQ ID NOs: 2422-2469 and a S. pyogenes Cas9 protein, optionally comprising K848A, K1003A, and R1060A amino acid substitutions or an R691A amino acid substitution, encapsulated in i) a viral vector selected from an AAV vector and a lentiviral vector; ii) a lipid nanoparticle; iii) a virus-like particle; iv) a liposome; or v) a lipid nanocrystal. In some embodiments, the pharmaceutical composition comprises an sgRNA having a crRNA sequence selected from SEQ ID NOs: 2422-2469 and a S. pyogenes Cas9 protein encapsulated in a lipid nanoparticle.

[0895] In various embodiments, the pharmaceutical composition comprising a CRISPR gene-editing system targeting the TACR3 gene is used in a method of treating a mammal in need thereof. In some embodiments, the method treats a discogenic disease or disorder. In some embodiments, the discogenic disease or disorder is low back pain, neck pain, lumbar pain, degenerative disc disease, discogenic pain annual ligament tear, herniated disc, spinal facet joint arthritis, intervertebral disc disease, spondylosis, painful scoliosis, or spinal stenosis. In some embodiments, the discogenic disease or disorder is discogenic pain.

[0896] In some embodiments, a method is provided for treating a discogenic disease or disorder by administering a therapeutically affective amount of a pharmaceutical composition comprising a CRISPR gene-editing system targeting the TACR3 gene, as described herein, to a subject in need thereof. In some embodiments, the pharmaceutical composition comprises an LNP encapsuling an sgRNA having a crRNA sequence selected from SEQ ID NOs: 2422-2469 and a S. pyogenes Cas9 protein. In some embodiments, the crRNA sequence is selected from SEQ ID NOs: 2422-2446. In some embodiments, the crRNA sequence is selected from SEQ ID NOs: 2422-2431. In some embodiments, the pharmaceutical composition is administered by intradiscal injection.

[0897] In some embodiments, a method is provided for treating a musculoskeletal disease or disorder by administering a therapeutically affective amount of a pharmaceutical composition comprising a CRISPR gene-editing system targeting the TACR3 gene, as described herein, to a subject in need thereof. In some embodiments, the musculoskeletal disease or disorder is Arthritis, Infectious Intermittent joint effusion, Ankylosing spondylitis, Arthritis, Osteoarthritis, Spondylarthritis, Plantar fasciitis, Degenerative polyarthritis, Hemophilic arthropathy, Inflammatory myopathy with abundant macrophages, or Polymyositis.

[0898] In yet other embodiments, a method is provided for treating an inflammatory disease or disorder by administering a therapeutically affective amount of a pharmaceutical composition comprising a CRISPR gene-editing system targeting the TACR3 gene, as described herein, to a subject in need thereof. In some embodiments, the inflammatory disease or disorder is Autoinflammatory Disease (AID), Cryopyrin Associated Periodic syndrome (CAPS), Familial Mediterranean Fever (FMF), TNF-Receptor Associated Periodic Syndrome (TRAPS), Hyper-IgD Syndrome (HIDS), Systemic Lupus Erythematosus (SLE), or Fibrosis (general).

[0899] In certain embodiments, any region of an TACR3 gene (e.g., 5′ untranslated region [UTR], exon 1, exon 2, exon 3, exon 4, exon 5, any intervening intronic regions, intron/exon junctions, the 3′ UTR, or polyadenylation signal) is targeted by an RNA-guided nuclease to alter the gene. In some embodiments, the TACR3 gene targeted by an RNA-guided nuclease is from a mammal. In some embodiments, the TACR3 gene targeted by an RNA-guided nuclease is from a human (hTACR3). In some embodiments, the TACR3 gene targeted by an RNA-guided nuclease is from a dog (cTACR3). In some embodiments, the TACR3 gene targeted by an RNA-guided nuclease is from a horse (eTACR3). In some embodiments, the TACR3 gene targeted by an RNA-guided nuclease is from a cat (fTACR3).

### SSS. MRGPRX2

[0900] In one aspect, methods and pharmaceutical compositions are provided for treating a back or spine condition or disorder by administering a therapeutically effective amount of a CRISPR pharmaceutical composition that targets an MRGPRX2 gene to a subject in need thereof. In some embodiments, the CRISPR pharmaceutical composition comprises an RNA-guided nuclease and an sgRNA targeting the MRGPRX2 gene with a crRNA sequence selected from SEQ ID NOs: 1569-1585. In some embodiments, the crRNA sequence is selected from 1569-1578. In some embodiments, the RNA-guided nuclease is a Cas9 protein. In some embodiments, the Cas9 protein is an S. pyogenes Cas9 protein. In some embodiments, the S. pyogenes Cas9 protein comprises K848A, K1003A, and R1060A amino acid substitutions relative to the SpCas9 sequence of NCBI accession number 7S37_P. In some embodiments, the S. pyogenes Cas9 protein comprises an R691A amino acid substitution relative to the SpCas9 sequence of NCBI accession number 7S37_P.

[0901] In some embodiments, the CRISPR gene-editing system targeting the MRGPRX2 gene is delivered to a mammalian cell via viral vector. In some embodiments, the CRISPR gene-editing system targeting the MRGPRX2 gene is delivered to a mammalian cell via an AAV vector. In some embodiments, the CRISPR gene-editing system targeting the MRGPRX2 gene is delivered to a mammalian cell via a lentiviral vector. In some embodiments, the CRISPR gene-editing system targeting the MRGPRX2 gene is delivered to a mammalian cell via a lipid nanoparticle. In some embodiments, the CRISPR gene-editing system targeting the MRGPRX2 gene is delivered to a mammalian cell via a virus-like particle. In some embodiments, the CRISPR gene-editing system targeting the MRGPRX2 gene is delivered to a mammalian cell via a liposome. In some embodiments, the CRISPR gene-editing system targeting the MRGPRX2 gene is delivered to a mammalian cell via a lipid nanocrystal.

[0902] In some embodiments, the pharmaceutical composition comprises an sgRNA having a crRNA sequence selected from SEQ ID NOs: 1569-1585 and a S. pyogenes Cas9 protein, optionally comprising K848A, K1003A, and R1060A amino acid substitutions or an R691A amino acid substitution, encapsulated in i) a viral vector selected from an AAV vector and a lentiviral vector; ii) a lipid nanoparticle; iii) a virus-like particle; iv) a liposome; or v) a lipid nanocrystal. In some embodiments, the pharmaceutical composition comprises an sgRNA having a crRNA sequence selected from SEQ ID NOs: 1569-1585 and a S. pyogenes Cas9 protein encapsulated in a lipid nanoparticle.

[0903] In various embodiments, the pharmaceutical composition comprising a CRISPR gene-editing system targeting the MRGPRX2 gene is used in a method of treating a mammal in need thereof. In some embodiments, the method treats a discogenic disease or disorder. In some embodiments, the discogenic disease or disorder is low back pain, neck pain, lumbar pain, degenerative disc disease, discogenic pain annual ligament tear, herniated disc, spinal facet joint arthritis, intervertebral disc disease, spondylosis, painful scoliosis, or spinal stenosis. In some embodiments, the discogenic disease or disorder is discogenic pain.

[0904] In some embodiments, a method is provided for treating a discogenic disease or disorder by administering a therapeutically affective amount of a pharmaceutical composition comprising a CRISPR gene-editing system targeting the MRGPRX2 gene, as described herein, to a subject in need thereof. In some embodiments, the pharmaceutical composition comprises an LNP encapsuling an sgRNA having a crRNA sequence selected from SEQ ID NOs: 1569-1585 and a S. pyogenes Cas9 protein. In some embodiments, the crRNA sequence is selected from SEQ ID NOs: 1569-1578. In some embodiments, the pharmaceutical composition is administered by intradiscal injection.

[0905] In some embodiments, a method is provided for treating a musculoskeletal disease or disorder by administering a therapeutically affective amount of a pharmaceutical composition comprising a CRISPR gene-editing system targeting the MRGPRX2 gene, as described herein, to a subject in need thereof. In some embodiments, the musculoskeletal disease or disorder is Arthritis, Infectious Intermittent joint effusion, Ankylosing spondylitis, Arthritis, Osteoarthritis, Spondylarthritis, Plantar fasciitis, Degenerative polyarthritis, Hemophilic arthropathy, Inflammatory myopathy with abundant macrophages, or Polymyositis.

[0906] In yet other embodiments, a method is provided for treating an inflammatory disease or disorder by administering a therapeutically affective amount of a pharmaceutical composition comprising a CRISPR gene-editing system targeting the MRGPRX2 gene, as described herein, to a subject in need thereof. In some embodiments, the inflammatory disease or disorder is Autoinflammatory Disease (AID), Cryopyrin Associated Periodic syndrome (CAPS), Familial Mediterranean Fever (FMF), TNF-Receptor Associated Periodic Syndrome (TRAPS), Hyper-IgD Syndrome (HIDS), Systemic Lupus Erythematosus (SLE), or Fibrosis (general).

[0907] In certain embodiments, any region of an MRGPRX2 gene (e.g., 5′ untranslated region [UTR], exon 1, exon 2, exon 3, exon 4, exon 5, any intervening intronic regions, intron/exon junctions, the 3′ UTR, or polyadenylation signal) is targeted by an RNA-guided nuclease to alter the gene. In some embodiments, the MRGPRX2 gene targeted by an RNA-guided nuclease is from a mammal. In some embodiments, the MRGPRX2 gene targeted by an RNA-guided nuclease is from a human (hMRGPRX2). In some embodiments, the MRGPRX2 gene targeted by an RNA-guided nuclease is from a dog (cMRGPRX2). In some embodiments, the MRGPRX2 gene targeted by an RNA-guided nuclease is from a horse (eMRGPRX2). In some embodiments, the MRGPRX2 gene targeted by an RNA-guided nuclease is from a cat (fMRGPRX2).

### TTT. ATP1A1

[0908] In one aspect, methods and pharmaceutical compositions are provided for treating a back or spine condition or disorder by administering a therapeutically effective amount of a CRISPR pharmaceutical composition that targets an ATP1A1 gene to a subject in need thereof. In some embodiments, the CRISPR pharmaceutical composition comprises an RNA-guided nuclease and an sgRNA targeting the ATP1A1 gene with a crRNA sequence selected from SEQ ID NOs: 193-240. In some embodiments, the crRNA sequence is selected from SEQ ID NOs: 193-217. In some embodiments, the crRNA sequence is selected from 193-202. In some embodiments, the RNA-guided nuclease is a Cas9 protein. In some embodiments, the Cas9 protein is an S. pyogenes Cas9 protein. In some embodiments, the S. pyogenes Cas9 protein comprises K848A, K1003A, and R1060A amino acid substitutions relative to the SpCas9 sequence of NCBI accession number 7S37_P. In some embodiments, the S. pyogenes Cas9 protein comprises an R691A amino acid substitution relative to the SpCas9 sequence of NCBI accession number 7S37_P.

[0909] In some embodiments, the CRISPR gene-editing system targeting the ATP1A1 gene is delivered to a mammalian cell via viral vector. In some embodiments, the CRISPR gene-editing system targeting the ATP1A1 gene is delivered to a mammalian cell via an AAV vector. In some embodiments, the CRISPR gene-editing system targeting the ATP1A1 gene is delivered to a mammalian cell via a lentiviral vector. In some embodiments, the CRISPR gene-editing system targeting the ATP1A1 gene is delivered to a mammalian cell via a lipid nanoparticle. In some embodiments, the CRISPR gene-editing system targeting the ATP1A1 gene is delivered to a mammalian cell via a virus-like particle. In some embodiments, the CRISPR gene-editing system targeting the ATP1A1 gene is delivered to a mammalian cell via a liposome. In some embodiments, the CRISPR gene-editing system targeting the ATP1A1 gene is delivered to a mammalian cell via a lipid nanocrystal.

[0910] In some embodiments, the pharmaceutical composition comprises an sgRNA having a crRNA sequence selected from SEQ ID NOs: 193-239 and a S. pyogenes Cas9 protein, optionally comprising K848A, K1003A, and R1060A amino acid substitutions or an R691A amino acid substitution, encapsulated in i) a viral vector selected from an AAV vector and a lentiviral vector; ii) a lipid nanoparticle; iii) a virus-like particle; iv) a liposome; or v) a lipid nanocrystal. In some embodiments, the pharmaceutical composition comprises an sgRNA having a crRNA sequence selected from SEQ ID NOs: 193-239 and a S. pyogenes Cas9 protein encapsulated in a lipid nanoparticle.

[0911] In various embodiments, the pharmaceutical composition comprising a CRISPR gene-editing system targeting the ATP1A1 gene is used in a method of treating a mammal in need thereof. In some embodiments, the method treats a discogenic disease or disorder. In some embodiments, the discogenic disease or disorder is low back pain, neck pain, lumbar pain, degenerative disc disease, discogenic pain annual ligament tear, herniated disc, spinal facet joint arthritis, intervertebral disc disease, spondylosis, painful scoliosis, or spinal stenosis. In some embodiments, the discogenic disease or disorder is discogenic pain.

[0912] In some embodiments, a method is provided for treating a discogenic disease or disorder by administering a therapeutically affective amount of a pharmaceutical composition comprising a CRISPR gene-editing system targeting the ATP1 A1 gene, as described herein, to a subject in need thereof. In some embodiments, the pharmaceutical composition comprises an LNP encapsuling an sgRNA having a crRNA sequence selected from SEQ ID NOs: 193-239 and a S. pyogenes Cas9 protein. In some embodiments, the crRNA sequence is selected from SEQ ID NOs: 193-217. In some embodiments, the crRNA sequence is selected from SEQ ID NOs: 193-202. In some embodiments, the pharmaceutical composition is administered by intradiscal injection.

[0913] In some embodiments, a method is provided for treating a musculoskeletal disease or disorder by administering a therapeutically affective amount of a pharmaceutical composition comprising a CRISPR gene-editing system targeting the ATP1A1 gene, as described herein, to a subject in need thereof. In some embodiments, the musculoskeletal disease or disorder is Arthritis, Infectious Intermittent joint effusion, Ankylosing spondylitis, Arthritis, Osteoarthritis, Spondylarthritis, Plantar fasciitis, Degenerative polyarthritis, Hemophilic arthropathy, Inflammatory myopathy with abundant macrophages, or Polymyositis.

[0914] In yet other embodiments, a method is provided for treating an inflammatory disease or disorder by administering a therapeutically affective amount of a pharmaceutical composition comprising a CRISPR gene-editing system targeting the ATP1A1 gene, as described herein, to a subject in need thereof. In some embodiments, the inflammatory disease or disorder is Autoinflammatory Disease (AID), Cryopyrin Associated Periodic syndrome (CAPS), Familial Mediterranean Fever (FMF), TNF-Receptor Associated Periodic Syndrome (TRAPS), Hyper-IgD Syndrome (HIDS), Systemic Lupus Erythematosus (SLE), or Fibrosis (general).

[0915] In certain embodiments, any region of an ATP1A1 gene (e.g., 5′ untranslated region [UTR], exon 1, exon 2, exon 3, exon 4, exon 5, exon 6, exon 7, exon 8, exon 9, exon 10, exon 11, exon 12, exon 13, exon 14, exon 15, exon 16, exon 17, exon 18, exon 19, exon 20, exon 21, exon 22, exon 23, exon 24, exon 25, any intervening intronic regions, intron/exon junctions, the 3′ UTR, or polyadenylation signal) is targeted by an RNA-guided nuclease to alter the gene. In some embodiments, the ATP1A1 gene targeted by an RNA-guided nuclease is from a mammal. In some embodiments, the ATP1A1 gene targeted by an RNA-guided nuclease is from a human (hATP1A1). In some embodiments, the ATP1A1 gene targeted by an RNA-guided nuclease is from a dog (cATP1A1). In some embodiments, the ATP1A1 gene targeted by an RNA-guided nuclease is from a horse (eATP1A1). In some embodiments, the ATP1A1 gene targeted by an RNA-guided nuclease is from a cat (fATP1A1).

### UUU. CALCA

[0916] In one aspect, methods and pharmaceutical compositions are provided for treating a back or spine condition or disorder by administering a therapeutically effective amount of a CRISPR pharmaceutical composition that targets an CALCA gene to a subject in need thereof. In some embodiments, the CRISPR pharmaceutical composition comprises an RNA-guided nuclease and an sgRNA targeting the CALCA gene with a crRNA sequence selected from SEQ ID NOs: 282-301. In some embodiments, the crRNA sequence is selected from 282-291. In some embodiments, the RNA-guided nuclease is a Cas9 protein. In some embodiments, the Cas9 protein is an S. pyogenes Cas9 protein. In some embodiments, the S. pyogenes Cas9 protein comprises K848A, K1003A, and R1060A amino acid substitutions relative to the SpCas9 sequence of NCBI accession number 7S37_P. In some embodiments, the S. pyogenes Cas9 protein comprises an R691A amino acid substitution relative to the SpCas9 sequence of NCBI accession number 7S37_P.

[0917] In some embodiments, the CRISPR gene-editing system targeting the CALCA gene is delivered to a mammalian cell via viral vector. In some embodiments, the CRISPR gene-editing system targeting the CALCA gene is delivered to a mammalian cell via an AAV vector. In some embodiments, the CRISPR gene-editing system targeting the CALCA gene is delivered to a mammalian cell via a lentiviral vector. In some embodiments, the CRISPR gene-editing system targeting the CALCA gene is delivered to a mammalian cell via a lipid nanoparticle. In some embodiments, the CRISPR gene-editing system targeting the CALCA gene is delivered to a mammalian cell via a virus-like particle. In some embodiments, the CRISPR gene-editing system targeting the CALCA gene is delivered to a mammalian cell via a liposome. In some embodiments, the CRISPR gene-editing system targeting the CALCA gene is delivered to a mammalian cell via a lipid nanocrystal.

[0918] In some embodiments, the pharmaceutical composition comprises an sgRNA having a crRNA sequence selected from SEQ ID NOs: 282-301 and a S. pyogenes Cas9 protein, optionally comprising K848A, K1003A, and R1060A amino acid substitutions or an R691A amino acid substitution, encapsulated in i) a viral vector selected from an AAV vector and a lentiviral vector; ii) a lipid nanoparticle; iii) a virus-like particle; iv) a liposome; or v) a lipid nanocrystal. In some embodiments, the pharmaceutical composition comprises an sgRNA having a crRNA sequence selected from SEQ ID NOs: 282-301 and a S. pyogenes Cas9 protein encapsulated in a lipid nanoparticle.

[0919] In various embodiments, the pharmaceutical composition comprising a CRISPR gene-editing system targeting the CALCA gene is used in a method of treating a mammal in need thereof. In some embodiments, the method treats a discogenic disease or disorder. In some embodiments, the discogenic disease or disorder is low back pain, neck pain, lumbar pain, degenerative disc disease, discogenic pain annual ligament tear, herniated disc, spinal facet joint arthritis, intervertebral disc disease, spondylosis, painful scoliosis, or spinal stenosis. In some embodiments, the discogenic disease or disorder is discogenic pain.

[0920] In some embodiments, a method is provided for treating a discogenic disease or disorder by administering a therapeutically affective amount of a pharmaceutical composition comprising a CRISPR gene-editing system targeting the CALCA gene, as described herein, to a subject in need thereof. In some embodiments, the pharmaceutical composition comprises an LNP encapsuling an sgRNA having a crRNA sequence selected from SEQ ID NOs: 282-301 and a S. pyogenes Cas9 protein. In some embodiments, the crRNA sequence is selected from SEQ ID NOs: 282-291. In some embodiments, the pharmaceutical composition is administered by intradiscal injection.

[0921] In some embodiments, a method is provided for treating a musculoskeletal disease or disorder by administering a therapeutically affective amount of a pharmaceutical composition comprising a CRISPR gene-editing system targeting the CALCA gene, as described herein, to a subject in need thereof. In some embodiments, the musculoskeletal disease or disorder is Arthritis, Infectious Intermittent joint effusion, Ankylosing spondylitis, Arthritis, Osteoarthritis, Spondylarthritis, Plantar fasciitis, Degenerative polyarthritis, Hemophilic arthropathy, Inflammatory myopathy with abundant macrophages, or Polymyositis.

[0922] In yet other embodiments, a method is provided for treating an inflammatory disease or disorder by administering a therapeutically affective amount of a pharmaceutical composition comprising a CRISPR gene-editing system targeting the CALCA gene, as described herein, to a subject in need thereof. In some embodiments, the inflammatory disease or disorder is Autoinflammatory Disease (AID), Cryopyrin Associated Periodic syndrome (CAPS), Familial Mediterranean Fever (FMF), TNF-Receptor Associated Periodic Syndrome (TRAPS), Hyper-IgD Syndrome (HIDS), Systemic Lupus Erythematosus (SLE), or Fibrosis (general).

[0923] In certain embodiments, any region of an CALCA gene (e.g., 5′ untranslated region [UTR], exon 1, exon 2, exon 3, exon 4, exon 5, exon 6, exon 7, any intervening intronic regions, intron/exon junctions, the 3′ UTR, or polyadenylation signal) is targeted by an RNA-guided nuclease to alter the gene. In some embodiments, the CALCA gene targeted by an RNA-guided nuclease is from a mammal. In some embodiments, the CALCA gene targeted by an RNA-guided nuclease is from a human (hCALCA). In some embodiments, the CALCA gene targeted by an RNA-guided nuclease is from a dog (cCALCA). In some embodiments, the CALCA gene targeted by an RNA-guided nuclease is from a horse (eCALCA). In some embodiments, the CALCA gene targeted by an RNA-guided nuclease is from a cat (fCALCA).

### VVV. CALCB

[0924] In one aspect, methods and pharmaceutical compositions are provided for treating a back or spine condition or disorder by administering a therapeutically effective amount of a CRISPR pharmaceutical composition that targets an CALCB gene to a subject in need thereof. In some embodiments, the CRISPR pharmaceutical composition comprises an RNA-guided nuclease and an sgRNA targeting the CALCB gene with a crRNA sequence selected from SEQ ID NOs: 302-318. In some embodiments, the crRNA sequence is selected from 302-311. In some embodiments, the RNA-guided nuclease is a Cas9 protein. In some embodiments, the Cas9 protein is an S. pyogenes Cas9 protein. In some embodiments, the S. pyogenes Cas9 protein comprises K848A, K1003A, and R1060A amino acid substitutions relative to the SpCas9 sequence of NCBI accession number 7S37_P. In some embodiments, the S. pyogenes Cas9 protein comprises an R691A amino acid substitution relative to the SpCas9 sequence of NCBI accession number 7S37_P.

[0925] In some embodiments, the CRISPR gene-editing system targeting the CALCB gene is delivered to a mammalian cell via viral vector. In some embodiments, the CRISPR gene-editing system targeting the CALCB gene is delivered to a mammalian cell via an AAV vector. In some embodiments, the CRISPR gene-editing system targeting the CALCB gene is delivered to a mammalian cell via a lentiviral vector. In some embodiments, the CRISPR gene-editing system targeting the CALCB gene is delivered to a mammalian cell via a lipid nanoparticle. In some embodiments, the CRISPR gene-editing system targeting the CALCB gene is delivered to a mammalian cell via a virus-like particle. In some embodiments, the CRISPR gene-editing system targeting the CALCB gene is delivered to a mammalian cell via a liposome. In some embodiments, the CRISPR gene-editing system targeting the CALCB gene is delivered to a mammalian cell via a lipid nanocrystal.

[0926] In some embodiments, the pharmaceutical composition comprises an sgRNA having a crRNA sequence selected from SEQ ID NOs: 302-318 and a S. pyogenes Cas9 protein, optionally comprising K848A, K1003A, and R1060A amino acid substitutions or an R691A amino acid substitution, encapsulated in i) a viral vector selected from an AAV vector and a lentiviral vector; ii) a lipid nanoparticle; iii) a virus-like particle; iv) a liposome; or v) a lipid nanocrystal. In some embodiments, the pharmaceutical composition comprises an sgRNA having a crRNA sequence selected from SEQ ID NOs: 302-318 and a S. pyogenes Cas9 protein encapsulated in a lipid nanoparticle.

[0927] In various embodiments, the pharmaceutical composition comprising a CRISPR gene-editing system targeting the CALCB gene is used in a method of treating a mammal in need thereof. In some embodiments, the method treats a discogenic disease or disorder. In some embodiments, the discogenic disease or disorder is low back pain, neck pain, lumbar pain, degenerative disc disease, discogenic pain annual ligament tear, herniated disc, spinal facet joint arthritis, intervertebral disc disease, spondylosis, painful scoliosis, or spinal stenosis. In some embodiments, the discogenic disease or disorder is discogenic pain.

[0928] In some embodiments, a method is provided for treating a discogenic disease or disorder by administering a therapeutically affective amount of a pharmaceutical composition comprising a CRISPR gene-editing system targeting the CALCB gene, as described herein, to a subject in need thereof. In some embodiments, the pharmaceutical composition comprises an LNP encapsuling an sgRNA having a crRNA sequence selected from SEQ ID NOs: 302-318 and a S. pyogenes Cas9 protein. In some embodiments, the crRNA sequence is selected from SEQ ID NOs: 302-311. In some embodiments, the pharmaceutical composition is administered by intradiscal injection.

[0929] In some embodiments, a method is provided for treating a musculoskeletal disease or disorder by administering a therapeutically affective amount of a pharmaceutical composition comprising a CRISPR gene-editing system targeting the CALCB gene, as described herein, to a subject in need thereof. In some embodiments, the musculoskeletal disease or disorder is Arthritis, Infectious Intermittent joint effusion, Ankylosing spondylitis, Arthritis, Osteoarthritis, Spondylarthritis, Plantar fasciitis, Degenerative polyarthritis, Hemophilic arthropathy, Inflammatory myopathy with abundant macrophages, or Polymyositis.

[0930] In yet other embodiments, a method is provided for treating an inflammatory disease or disorder by administering a therapeutically affective amount of a pharmaceutical composition comprising a CRISPR gene-editing system targeting the CALCB gene, as described herein, to a subject in need thereof. In some embodiments, the inflammatory disease or disorder is Autoinflammatory Disease (AID), Cryopyrin Associated Periodic syndrome (CAPS), Familial Mediterranean Fever (FMF), TNF-Receptor Associated Periodic Syndrome (TRAPS), Hyper-IgD Syndrome (HIDS), Systemic Lupus Erythematosus (SLE), or Fibrosis (general).

[0931] In certain embodiments, any region of an CALCB gene (e.g., 5′ untranslated region [UTR], exon 1, exon 2, exon 3, exon 4, exon 5, exon 6, exon 7, any intervening intronic regions, intron/exon junctions, the 3′ UTR, or polyadenylation signal) is targeted by an RNA-guided nuclease to alter the gene. In some embodiments, the CALCB gene targeted by an RNA-guided nuclease is from a mammal. In some embodiments, the CALCB gene targeted by an RNA-guided nuclease is from a human (hCALCB). In some embodiments, the CALCB gene targeted by an RNA-guided nuclease is from a dog (cCALCB). In some embodiments, the CALCB gene targeted by an RNA-guided nuclease is from a horse (eCALCB). In some embodiments, the CALCB gene targeted by an RNA-guided nuclease is from a cat (fCALCB).

### WWW. CALCRL

[0932] In one aspect, methods and pharmaceutical compositions are provided for treating a back or spine condition or disorder by administering a therapeutically effective amount of a CRISPR pharmaceutical composition that targets an CALCRL gene to a subject in need thereof. In some embodiments, the CRISPR pharmaceutical composition comprises an RNA-guided nuclease and an sgRNA targeting the CALCRL gene with a crRNA sequence selected from SEQ ID NOs: 319-340. In some embodiments, the crRNA sequence is selected from 319-328. In some embodiments, the RNA-guided nuclease is a Cas9 protein. In some embodiments, the Cas9 protein is an S. pyogenes Cas9 protein. In some embodiments, the S. pyogenes Cas9 protein comprises K848A, K1003A, and R1060A amino acid substitutions relative to the SpCas9 sequence of NCBI accession number 7S37_P. In some embodiments, the S. pyogenes Cas9 protein comprises an R691A amino acid substitution relative to the SpCas9 sequence of NCBI accession number 7S37_P.

[0933] In some embodiments, the CRISPR gene-editing system targeting the CALCRL gene is delivered to a mammalian cell via viral vector. In some embodiments, the CRISPR gene-editing system targeting the CALCRL gene is delivered to a mammalian cell via an AAV vector. In some embodiments, the CRISPR gene-editing system targeting the CALCRL gene is delivered to a mammalian cell via a lentiviral vector. In some embodiments, the CRISPR gene-editing system targeting the CALCRL gene is delivered to a mammalian cell via a lipid nanoparticle. In some embodiments, the CRISPR gene-editing system targeting the CALCRL gene is delivered to a mammalian cell via a virus-like particle. In some embodiments, the CRISPR gene-editing system targeting the CALCRL gene is delivered to a mammalian cell via a liposome. In some embodiments, the CRISPR gene-editing system targeting the CALCRL gene is delivered to a mammalian cell via a lipid nanocrystal.

[0934] In some embodiments, the pharmaceutical composition comprises an sgRNA having a crRNA sequence selected from SEQ ID NOs: 319-340 and a S. pyogenes Cas9 protein, optionally comprising K848A, K1003A, and R1060A amino acid substitutions or an R691A amino acid substitution, encapsulated in i) a viral vector selected from an AAV vector and a lentiviral vector; ii) a lipid nanoparticle; iii) a virus-like particle; iv) a liposome; or v) a lipid nanocrystal. In some embodiments, the pharmaceutical composition comprises an sgRNA having a crRNA sequence selected from SEQ ID NOs: 319-340 and a S. pyogenes Cas9 protein encapsulated in a lipid nanoparticle.

[0935] In various embodiments, the pharmaceutical composition comprising a CRISPR gene-editing system targeting the CALCRL gene is used in a method of treating a mammal in need thereof. In some embodiments, the method treats a discogenic disease or disorder. In some embodiments, the discogenic disease or disorder is low back pain, neck pain, lumbar pain, degenerative disc disease, discogenic pain annual ligament tear, herniated disc, spinal facet joint arthritis, intervertebral disc disease, spondylosis, painful scoliosis, or spinal stenosis. In some embodiments, the discogenic disease or disorder is discogenic pain.

[0936] In some embodiments, a method is provided for treating a discogenic disease or disorder by administering a therapeutically affective amount of a pharmaceutical composition comprising a CRISPR gene-editing system targeting the CALCRL gene, as described herein, to a subject in need thereof. In some embodiments, the pharmaceutical composition comprises an LNP encapsuling an sgRNA having a crRNA sequence selected from SEQ ID NOs: 319-340 and a S. pyogenes Cas9 protein. In some embodiments, the crRNA sequence is selected from SEQ ID NOs: 319-328. In some embodiments, the pharmaceutical composition is administered by intradiscal injection.

[0937] In some embodiments, a method is provided for treating a musculoskeletal disease or disorder by administering a therapeutically affective amount of a pharmaceutical composition comprising a CRISPR gene-editing system targeting the CALCRL gene, as described herein, to a subject in need thereof. In some embodiments, the musculoskeletal disease or disorder is Arthritis, Infectious Intermittent joint effusion, Ankylosing spondylitis, Arthritis, Osteoarthritis, Spondylarthritis, Plantar fasciitis, Degenerative polyarthritis, Hemophilic arthropathy, Inflammatory myopathy with abundant macrophages, or Polymyositis.

[0938] In yet other embodiments, a method is provided for treating an inflammatory disease or disorder by administering a therapeutically affective amount of a pharmaceutical composition comprising a CRISPR gene-editing system targeting the CALCRL gene, as described herein, to a subject in need thereof. In some embodiments, the inflammatory disease or disorder is Autoinflammatory Disease (AID), Cryopyrin Associated Periodic syndrome (CAPS), Familial Mediterranean Fever (FMF), TNF-Receptor Associated Periodic Syndrome (TRAPS), Hyper-IgD Syndrome (HIDS), Systemic Lupus Erythematosus (SLE), or Fibrosis (general).

[0939] In certain embodiments, any region of an CALCRL gene (e.g., 5′ untranslated region [UTR], exon 1, exon 2, exon 3, exon 4, exon 5, exon 6, exon 7, exon 8, exon 9, exon 10, exon 11, exon 12, exon 13, exon 14, exon 15, exon 16, exon 17, any intervening intronic regions, intron/exon junctions, the 3′ UTR, or polyadenylation signal) is targeted by an RNA-guided nuclease to alter the gene. In some embodiments, the CALCRL gene targeted by an RNA-guided nuclease is from a mammal. In some embodiments, the CALCRL gene targeted by an RNA-guided nuclease is from a human (hCALCRL). In some embodiments, the CALCRL gene targeted by an RNA-guided nuclease is from a dog (cCALCRL). In some embodiments, the CALCRL gene targeted by an RNA-guided nuclease is from a horse (eCALCRL). In some embodiments, the CALCRL gene targeted by an RNA-guided nuclease is from a cat (fCALCRL).

### XXX. RAMP1

[0940] In one aspect, methods and pharmaceutical compositions are provided for treating a back or spine condition or disorder by administering a therapeutically effective amount of a CRISPR pharmaceutical composition that targets an RAMP1 gene to a subject in need thereof. In some embodiments, the CRISPR pharmaceutical composition comprises an RNA-guided nuclease and an sgRNA targeting the RAMP1 gene with a crRNA sequence selected from SEQ ID NOs: 1843-1859. In some embodiments, the crRNA sequence is selected from 1843-1852. In some embodiments, the RNA-guided nuclease is a Cas9 protein. In some embodiments, the Cas9 protein is an S. pyogenes Cas9 protein. In some embodiments, the S. pyogenes Cas9 protein comprises K848A, K1003A, and R1060A amino acid substitutions relative to the SpCas9 sequence of NCBI accession number 7S37_P. In some embodiments, the S. pyogenes Cas9 protein comprises an R691A amino acid substitution relative to the SpCas9 sequence of NCBI accession number 7S37_P.

[0941] In some embodiments, the CRISPR gene-editing system targeting the RAMP1 gene is delivered to a mammalian cell via viral vector. In some embodiments, the CRISPR gene-editing system targeting the RAMP1 gene is delivered to a mammalian cell via an AAV vector. In some embodiments, the CRISPR gene-editing system targeting the RAMP1 gene is delivered to a mammalian cell via a lentiviral vector. In some embodiments, the CRISPR gene-editing system targeting the RAMP1 gene is delivered to a mammalian cell via a lipid nanoparticle. In some embodiments, the CRISPR gene-editing system targeting the RAMP1 gene is delivered to a mammalian cell via a virus-like particle. In some embodiments, the CRISPR gene-editing system targeting the RAMP1 gene is delivered to a mammalian cell via a liposome. In some embodiments, the CRISPR gene-editing system targeting the RAMP1 gene is delivered to a mammalian cell via a lipid nanocrystal.

[0942] In some embodiments, the pharmaceutical composition comprises an sgRNA having a crRNA sequence selected from SEQ ID NOs: 1843-1859 and a S. pyogenes Cas9 protein, optionally comprising K848A, K1003A, and R1060A amino acid substitutions or an R691A amino acid substitution, encapsulated in i) a viral vector selected from an AAV vector and a lentiviral vector; ii) a lipid nanoparticle; iii) a virus-like particle; iv) a liposome; or v) a lipid nanocrystal. In some embodiments, the pharmaceutical composition comprises an sgRNA having a crRNA sequence selected from SEQ ID NOs: 1843-1859 and a S. pyogenes Cas9 protein encapsulated in a lipid nanoparticle.

[0943] In various embodiments, the pharmaceutical composition comprising a CRISPR gene-editing system targeting the RAMP1 gene is used in a method of treating a mammal in need thereof. In some embodiments, the method treats a discogenic disease or disorder. In some embodiments, the discogenic disease or disorder is low back pain, neck pain, lumbar pain, degenerative disc disease, discogenic pain annual ligament tear, herniated disc, spinal facet joint arthritis, intervertebral disc disease, spondylosis, painful scoliosis, or spinal stenosis. In some embodiments, the discogenic disease or disorder is discogenic pain.

[0944] In some embodiments, a method is provided for treating a discogenic disease or disorder by administering a therapeutically affective amount of a pharmaceutical composition comprising a CRISPR gene-editing system targeting the RAMP1 gene, as described herein, to a subject in need thereof. In some embodiments, the pharmaceutical composition comprises an LNP encapsuling an sgRNA having a crRNA sequence selected from SEQ ID NOs: 1843-1859 and a S. pyogenes Cas9 protein. In some embodiments, the crRNA sequence is selected from SEQ ID NOs: 1843-1852. In some embodiments, the pharmaceutical composition is administered by intradiscal injection.

[0945] In some embodiments, a method is provided for treating a musculoskeletal disease or disorder by administering a therapeutically affective amount of a pharmaceutical composition comprising a CRISPR gene-editing system targeting the RAMP1 gene, as described herein, to a subject in need thereof. In some embodiments, the musculoskeletal disease or disorder is Arthritis, Infectious Intermittent joint effusion, Ankylosing spondylitis, Arthritis, Osteoarthritis, Spondylarthritis, Plantar fasciitis, Degenerative polyarthritis, Hemophilic arthropathy, Inflammatory myopathy with abundant macrophages, or Polymyositis.

[0946] In yet other embodiments, a method is provided for treating an inflammatory disease or disorder by administering a therapeutically affective amount of a pharmaceutical composition comprising a CRISPR gene-editing system targeting the RAMP1 gene, as described herein, to a subject in need thereof. In some embodiments, the inflammatory disease or disorder is Autoinflammatory Disease (AID), Cryopyrin Associated Periodic syndrome (CAPS), Familial Mediterranean Fever (FMF), TNF-Receptor Associated Periodic Syndrome (TRAPS), Hyper-IgD Syndrome (HIDS), Systemic Lupus Erythematosus (SLE), or Fibrosis (general).

[0947] In certain embodiments, any region of an RAMP1 gene (e.g., 5′ untranslated region [UTR], exon 1, exon 2, exon 3, exon 4, exon 5, exon 6, any intervening intronic regions, intron/exon junctions, the 3′ UTR, or polyadenylation signal) is targeted by an RNA-guided nuclease to alter the gene. In some embodiments, the RAMP1 gene targeted by an RNA-guided nuclease is from a mammal. In some embodiments, the RAMP1 gene targeted by an RNA-guided nuclease is from a human (hRAMP1). In some embodiments, the RAMP1 gene targeted by an RNA-guided nuclease is from a dog (cRAMP1). In some embodiments, the RAMP1 gene targeted by an RNA-guided nuclease is from a horse (eRAMP1). In some embodiments, the RAMP1 gene targeted by an RNA-guided nuclease is from a cat (fRAMP1).

### YYY. ADM

[0948] In one aspect, methods and pharmaceutical compositions are provided for treating a back or spine condition or disorder by administering a therapeutically effective amount of a CRISPR pharmaceutical composition that targets an ADM gene to a subject in need thereof. In some embodiments, the CRISPR pharmaceutical composition comprises an RNA-guided nuclease and an sgRNA targeting the ADM gene with a crRNA sequence selected from SEQ ID NOs: 145-192. In some embodiments, the crRNA sequence is selected from SEQ ID NOs: 145-169. In some embodiments, the crRNA sequence is selected from 145-154. In some embodiments, the RNA-guided nuclease is a Cas9 protein. In some embodiments, the Cas9 protein is an S. pyogenes Cas9 protein. In some embodiments, the S. pyogenes Cas9 protein comprises K848A, K1003A, and R1060A amino acid substitutions relative to the SpCas9 sequence of NCBI accession number 7S37_P. In some embodiments, the S. pyogenes Cas9 protein comprises an R691A amino acid substitution relative to the SpCas9 sequence of NCBI accession number 7S37_P.

[0949] In some embodiments, the CRISPR gene-editing system targeting the ADM gene is delivered to a mammalian cell via viral vector. In some embodiments, the CRISPR gene-editing system targeting the ADM gene is delivered to a mammalian cell via an AAV vector. In some embodiments, the CRISPR gene-editing system targeting the ADM gene is delivered to a mammalian cell via a lentiviral vector. In some embodiments, the CRISPR gene-editing system targeting the ADM gene is delivered to a mammalian cell via a lipid nanoparticle. In some embodiments, the CRISPR gene-editing system targeting the ADM gene is delivered to a mammalian cell via a virus-like particle. In some embodiments, the CRISPR gene-editing system targeting the ADM gene is delivered to a mammalian cell via a liposome. In some embodiments, the CRISPR gene-editing system targeting the ADM gene is delivered to a mammalian cell via a lipid nanocrystal.

[0950] In some embodiments, the pharmaceutical composition comprises an sgRNA having a crRNA sequence selected from SEQ ID NOs: 145-192 and a S. pyogenes Cas9 protein, optionally comprising K848A, K1003A, and R1060A amino acid substitutions or an R691A amino acid substitution, encapsulated in i) a viral vector selected from an AAV vector and a lentiviral vector; ii) a lipid nanoparticle; iii) a virus-like particle; iv) a liposome; or v) a lipid nanocrystal. In some embodiments, the pharmaceutical composition comprises an sgRNA having a crRNA sequence selected from SEQ ID NOs: 145-192 and a S. pyogenes Cas9 protein encapsulated in a lipid nanoparticle.

[0951] In various embodiments, the pharmaceutical composition comprising a CRISPR gene-editing system targeting the ADM gene is used in a method of treating a mammal in need thereof. In some embodiments, the method treats a discogenic disease or disorder. In some embodiments, the discogenic disease or disorder is low back pain, neck pain, lumbar pain, degenerative disc disease, discogenic pain annual ligament tear, herniated disc, spinal facet joint arthritis, intervertebral disc disease, spondylosis, painful scoliosis, or spinal stenosis. In some embodiments, the discogenic disease or disorder is discogenic pain.

[0952] In some embodiments, a method is provided for treating a discogenic disease or disorder by administering a therapeutically affective amount of a pharmaceutical composition comprising a CRISPR gene-editing system targeting the ADM gene, as described herein, to a subject in need thereof. In some embodiments, the pharmaceutical composition comprises an LNP encapsuling an sgRNA having a crRNA sequence selected from SEQ ID NOs: 145-192 and a S. pyogenes Cas9 protein. In some embodiments, the crRNA sequence is selected from SEQ ID NOs: 145-169. In some embodiments, the crRNA sequence is selected from SEQ ID NOs: 145-154. In some embodiments, the pharmaceutical composition is administered by intradiscal injection.

[0953] In some embodiments, a method is provided for treating a musculoskeletal disease or disorder by administering a therapeutically affective amount of a pharmaceutical composition comprising a CRISPR gene-editing system targeting the ADM gene, as described herein, to a subject in need thereof. In some embodiments, the musculoskeletal disease or disorder is Arthritis, Infectious Intermittent joint effusion, Ankylosing spondylitis, Arthritis, Osteoarthritis, Spondylarthritis, Plantar fasciitis, Degenerative polyarthritis, Hemophilic arthropathy, Inflammatory myopathy with abundant macrophages, or Polymyositis.

[0954] In yet other embodiments, a method is provided for treating an inflammatory disease or disorder by administering a therapeutically affective amount of a pharmaceutical composition comprising a CRISPR gene-editing system targeting the ADM gene, as described herein, to a subject in need thereof. In some embodiments, the inflammatory disease or disorder is Autoinflammatory Disease (AID), Cryopyrin Associated Periodic syndrome (CAPS), Familial Mediterranean Fever (FMF), TNF-Receptor Associated Periodic Syndrome (TRAPS), Hyper-IgD Syndrome (HIDS), Systemic Lupus Erythematosus (SLE), or Fibrosis (general).

[0955] In certain embodiments, any region of an ADM gene (e.g., 5′ untranslated region [UTR], exon 1, exon 2, exon 3, exon 4, any intervening intronic regions, intron/exon junctions, the 3′ UTR, or polyadenylation signal) is targeted by an RNA-guided nuclease to alter the gene. In some embodiments, the ADM gene targeted by an RNA-guided nuclease is from a mammal. In some embodiments, the ADM gene targeted by an RNA-guided nuclease is from a human (hADM). In some embodiments, the ADM gene targeted by an RNA-guided nuclease is from a dog (cADM). In some embodiments, the ADM gene targeted by an RNA-guided nuclease is from a horse (eADM). In some embodiments, the ADM gene targeted by an RNA-guided nuclease is from a cat (fADM).

### ZZZ. CRCP

[0956] In one aspect, methods and pharmaceutical compositions are provided for treating a back or spine condition or disorder by administering a therapeutically effective amount of a CRISPR pharmaceutical composition that targets an CRCP gene to a subject in need thereof. In some embodiments, the CRISPR pharmaceutical composition comprises an RNA-guided nuclease and an sgRNA targeting the CRCP gene with a crRNA sequence selected from SEQ ID NOs: 518-534. In some embodiments, the crRNA sequence is selected from 518-527. In some embodiments, the RNA-guided nuclease is a Cas9 protein. In some embodiments, the Cas9 protein is an S. pyogenes Cas9 protein. In some embodiments, the S. pyogenes Cas9 protein comprises K848A, K1003A, and R1060A amino acid substitutions relative to the SpCas9 sequence of NCBI accession number 7S37_P. In some embodiments, the S. pyogenes Cas9 protein comprises an R691A amino acid substitution relative to the SpCas9 sequence of NCBI accession number 7S37_P.

[0957] In some embodiments, the CRISPR gene-editing system targeting the CRCP gene is delivered to a mammalian cell via viral vector. In some embodiments, the CRISPR gene-editing system targeting the CRCP gene is delivered to a mammalian cell via an AAV vector.

[0958] In some embodiments, the CRISPR gene-editing system targeting the CRCP gene is delivered to a mammalian cell via a lentiviral vector. In some embodiments, the CRISPR gene-editing system targeting the CRCP gene is delivered to a mammalian cell via a lipid nanoparticle. In some embodiments, the CRISPR gene-editing system targeting the CRCP gene is delivered to a mammalian cell via a virus-like particle. In some embodiments, the CRISPR gene-editing system targeting the CRCP gene is delivered to a mammalian cell via a liposome. In some embodiments, the CRISPR gene-editing system targeting the CRCP gene is delivered to a mammalian cell via a lipid nanocrystal.

[0959] In some embodiments, the pharmaceutical composition comprises an sgRNA having a crRNA sequence selected from SEQ ID NOs: 518-534 and a S. pyogenes Cas9 protein, optionally comprising K848A, K1003A, and R1060A amino acid substitutions or an R691A amino acid substitution, encapsulated in i) a viral vector selected from an AAV vector and a lentiviral vector; ii) a lipid nanoparticle; iii) a virus-like particle; iv) a liposome; or v) a lipid nanocrystal. In some embodiments, the pharmaceutical composition comprises an sgRNA having a crRNA sequence selected from SEQ ID NOs: 518-534 and a S. pyogenes Cas9 protein encapsulated in a lipid nanoparticle.

[0960] In various embodiments, the pharmaceutical composition comprising a CRISPR gene-editing system targeting the CRCP gene is used in a method of treating a mammal in need thereof. In some embodiments, the method treats a discogenic disease or disorder. In some embodiments, the discogenic disease or disorder is low back pain, neck pain, lumbar pain, degenerative disc disease, discogenic pain annual ligament tear, herniated disc, spinal facet joint arthritis, intervertebral disc disease, spondylosis, painful scoliosis, or spinal stenosis. In some embodiments, the discogenic disease or disorder is discogenic pain.

[0961] In some embodiments, a method is provided for treating a discogenic disease or disorder by administering a therapeutically affective amount of a pharmaceutical composition comprising a CRISPR gene-editing system targeting the CRCP gene, as described herein, to a subject in need thereof. In some embodiments, the pharmaceutical composition comprises an LNP encapsuling an sgRNA having a crRNA sequence selected from SEQ ID NOs: 518-534 and a S. pyogenes Cas9 protein. In some embodiments, the crRNA sequence is selected from SEQ ID NOs: 518-527. In some embodiments, the pharmaceutical composition is administered by intradiscal injection.

[0962] In some embodiments, a method is provided for treating a musculoskeletal disease or disorder by administering a therapeutically affective amount of a pharmaceutical composition comprising a CRISPR gene-editing system targeting the CRCP gene, as described herein, to a subject in need thereof. In some embodiments, the musculoskeletal disease or disorder is Arthritis, Infectious Intermittent joint effusion, Ankylosing spondylitis, Arthritis, Osteoarthritis, Spondylarthritis, Plantar fasciitis, Degenerative polyarthritis, Hemophilic arthropathy, Inflammatory myopathy with abundant macrophages, or Polymyositis.

[0963] In yet other embodiments, a method is provided for treating an inflammatory disease or disorder by administering a therapeutically affective amount of a pharmaceutical composition comprising a CRISPR gene-editing system targeting the CRCP gene, as described herein, to a subject in need thereof. In some embodiments, the inflammatory disease or disorder is Autoinflammatory Disease (AID), Cryopyrin Associated Periodic syndrome (CAPS), Familial Mediterranean Fever (FMF), TNF-Receptor Associated Periodic Syndrome (TRAPS), Hyper-IgD Syndrome (HIDS), Systemic Lupus Erythematosus (SLE), or Fibrosis (general).

[0964] In certain embodiments, any region of an CRCP gene (e.g., 5′ untranslated region [UTR], exon 1, exon 2, exon 3, exon 4, exon 5, exon 6, exon 7, exon 8, exon 9, exon 10, exon 11, any intervening intronic regions, intron/exon junctions, the 3′ UTR, or polyadenylation signal) is targeted by an RNA-guided nuclease to alter the gene. In some embodiments, the CRCP gene targeted by an RNA-guided nuclease is from a mammal. In some embodiments, the CRCP gene targeted by an RNA-guided nuclease is from a human (hCRCP). In some embodiments, the CRCP gene targeted by an RNA-guided nuclease is from a dog (cCRCP). In some embodiments, the CRCP gene targeted by an RNA-guided nuclease is from a horse (eCRCP). In some embodiments, the CRCP gene targeted by an RNA-guided nuclease is from a cat (fCRCP).

### AAAA. YAP1

[0965] In one aspect, methods and pharmaceutical compositions are provided for treating a back or spine condition or disorder by administering a therapeutically effective amount of a CRISPR pharmaceutical composition that targets an YAP1 gene to a subject in need thereof. In some embodiments, the CRISPR pharmaceutical composition comprises an RNA-guided nuclease and an sgRNA targeting the YAP1 gene with a crRNA sequence selected from SEQ ID NOs: 2671-2718. In some embodiments, the crRNA sequence is selected from SEQ ID NOs: 2671-2695. In some embodiments, the crRNA sequence is selected from 2671-2680. In some embodiments, the RNA-guided nuclease is a Cas9 protein. In some embodiments, the Cas9 protein is an S. pyogenes Cas9 protein. In some embodiments, the S. pyogenes Cas9 protein comprises K848A, K1003A, and R1060A amino acid substitutions relative to the SpCas9 sequence of NCBI accession number 7S37_P. In some embodiments, the S. pyogenes Cas9 protein comprises an R691A amino acid substitution relative to the SpCas9 sequence of NCBI accession number 7S37_P.

[0966] In some embodiments, the CRISPR gene-editing system targeting the YAP1 gene is delivered to a mammalian cell via viral vector. In some embodiments, the CRISPR gene-editing system targeting the YAP1 gene is delivered to a mammalian cell via an AAV vector. In some embodiments, the CRISPR gene-editing system targeting the YAP1 gene is delivered to a mammalian cell via a lentiviral vector. In some embodiments, the CRISPR gene-editing system targeting the YAP1 gene is delivered to a mammalian cell via a lipid nanoparticle. In some embodiments, the CRISPR gene-editing system targeting the YAP1 gene is delivered to a mammalian cell via a virus-like particle. In some embodiments, the CRISPR gene-editing system targeting the YAP1 gene is delivered to a mammalian cell via a liposome. In some embodiments, the CRISPR gene-editing system targeting the YAP1 gene is delivered to a mammalian cell via a lipid nanocrystal.

[0967] In some embodiments, the pharmaceutical composition comprises an sgRNA having a crRNA sequence selected from SEQ ID NOs: 2671-2718 and a S. pyogenes Cas9 protein, optionally comprising K848A, K1003A, and R1060A amino acid substitutions or an R691A amino acid substitution, encapsulated in i) a viral vector selected from an AAV vector and a lentiviral vector; ii) a lipid nanoparticle; iii) a virus-like particle; iv) a liposome; or v) a lipid nanocrystal. In some embodiments, the pharmaceutical composition comprises an sgRNA having a crRNA sequence selected from SEQ ID NOs: 2671-2718 and a S. pyogenes Cas9 protein encapsulated in a lipid nanoparticle.

[0968] In various embodiments, the pharmaceutical composition comprising a CRISPR gene-editing system targeting the YAP1 gene is used in a method of treating a mammal in need thereof. In some embodiments, the method treats a discogenic disease or disorder. In some embodiments, the discogenic disease or disorder is low back pain, neck pain, lumbar pain, degenerative disc disease, discogenic pain annual ligament tear, herniated disc, spinal facet joint arthritis, intervertebral disc disease, spondylosis, painful scoliosis, or spinal stenosis. In some embodiments, the discogenic disease or disorder is discogenic pain.

[0969] In some embodiments, a method is provided for treating a discogenic disease or disorder by administering a therapeutically affective amount of a pharmaceutical composition comprising a CRISPR gene-editing system targeting the YAP1 gene, as described herein, to a subject in need thereof. In some embodiments, the pharmaceutical composition comprises an LNP encapsuling an sgRNA having a crRNA sequence selected from SEQ ID NOs: 2671-2718 and a S. pyogenes Cas9 protein. In some embodiments, the crRNA sequence is selected from SEQ ID NOs: 2671-2695. In some embodiments, the crRNA sequence is selected from SEQ ID NOs: 2671-2680. In some embodiments, the pharmaceutical composition is administered by intradiscal injection.

[0970] In some embodiments, a method is provided for treating a musculoskeletal disease or disorder by administering a therapeutically affective amount of a pharmaceutical composition comprising a CRISPR gene-editing system targeting the YAP1 gene, as described herein, to a subject in need thereof. In some embodiments, the musculoskeletal disease or disorder is Arthritis, Infectious Intermittent joint effusion, Ankylosing spondylitis, Arthritis, Osteoarthritis, Spondylarthritis, Plantar fasciitis, Degenerative polyarthritis, Hemophilic arthropathy, Inflammatory myopathy with abundant macrophages, or Polymyositis.

[0971] In yet other embodiments, a method is provided for treating an inflammatory disease or disorder by administering a therapeutically affective amount of a pharmaceutical composition comprising a CRISPR gene-editing system targeting the YAP1 gene, as described herein, to a subject in need thereof. In some embodiments, the inflammatory disease or disorder is Autoinflammatory Disease (AID), Cryopyrin Associated Periodic syndrome (CAPS), Familial Mediterranean Fever (FMF), TNF-Receptor Associated Periodic Syndrome (TRAPS), Hyper-IgD Syndrome (HIDS), Systemic Lupus Erythematosus (SLE), or Fibrosis (general).

[0972] In certain embodiments, any region of an YAP1 gene (e.g., 5′ untranslated region [UTR], exon 1, exon 2, exon 3, exon 4, exon 5, exon 6, exon 7, exon 8, exon 9, exon 10, exon 11, any intervening intronic regions, intron/exon junctions, the 3′ UTR, or polyadenylation signal) is targeted by an RNA-guided nuclease to alter the gene. In some embodiments, the YAP1 gene targeted by an RNA-guided nuclease is from a mammal. In some embodiments, the YAP1 gene targeted by an RNA-guided nuclease is from a human (hYAP1). In some embodiments, the YAP1 gene targeted by an RNA-guided nuclease is from a dog (cYAP1). In some embodiments, the YAP1 gene targeted by an RNA-guided nuclease is from a horse (eYAP1). In some embodiments, the YAP1 gene targeted by an RNA-guided nuclease is from a cat (fYAP1).

### BBBB. IL1RAP

[0973] In one aspect, methods and pharmaceutical compositions are provided for treating a back or spine condition or disorder by administering a therapeutically effective amount of a CRISPR pharmaceutical composition that targets an IL1RAP gene to a subject in need thereof. In some embodiments, the CRISPR pharmaceutical composition comprises an RNA-guided nuclease and an sgRNA targeting the IL1RAP gene with a crRNA sequence selected from SEQ ID NOs: 840-887. In some embodiments, the crRNA sequence is selected from SEQ ID NOs: 840-864. In some embodiments, the crRNA sequence is selected from 840-849. In some embodiments, the RNA-guided nuclease is a Cas9 protein. In some embodiments, the Cas9 protein is an S. pyogenes Cas9 protein. In some embodiments, the S. pyogenes Cas9 protein comprises K848A, K1003A, and R1060A amino acid substitutions relative to the SpCas9 sequence of NCBI accession number 7S37_P. In some embodiments, the S. pyogenes Cas9 protein comprises an R691A amino acid substitution relative to the SpCas9 sequence of NCBI accession number 7S37_P.

[0974] In some embodiments, the CRISPR gene-editing system targeting the IL1RAP gene is delivered to a mammalian cell via viral vector. In some embodiments, the CRISPR gene-editing system targeting the IL1RAP gene is delivered to a mammalian cell via an AAV vector. In some embodiments, the CRISPR gene-editing system targeting the IL1RAP gene is delivered to a mammalian cell via a lentiviral vector. In some embodiments, the CRISPR gene-editing system targeting the IL1RAP gene is delivered to a mammalian cell via a lipid nanoparticle. In some embodiments, the CRISPR gene-editing system targeting the IL1RAP gene is delivered to a mammalian cell via a virus-like particle. In some embodiments, the CRISPR gene-editing system targeting the IL1RAP gene is delivered to a mammalian cell via a liposome. In some embodiments, the CRISPR gene-editing system targeting the IL1RAP gene is delivered to a mammalian cell via a lipid nanocrystal.

[0975] In some embodiments, the pharmaceutical composition comprises an sgRNA having a crRNA sequence selected from SEQ ID NOs: 840-887 and a S. pyogenes Cas9 protein, optionally comprising K848A, K1003A, and R1060A amino acid substitutions or an R691A amino acid substitution, encapsulated in i) a viral vector selected from an AAV vector and a lentiviral vector; ii) a lipid nanoparticle; iii) a virus-like particle; iv) a liposome; or v) a lipid nanocrystal. In some embodiments, the pharmaceutical composition comprises an sgRNA having a crRNA sequence selected from SEQ ID NOs: 840-887 and a S. pyogenes Cas9 protein encapsulated in a lipid nanoparticle.

[0976] In various embodiments, the pharmaceutical composition comprising a CRISPR gene-editing system targeting the IL1RAP gene is used in a method of treating a mammal in need thereof. In some embodiments, the method treats a discogenic disease or disorder. In some embodiments, the discogenic disease or disorder is low back pain, neck pain, lumbar pain, degenerative disc disease, discogenic pain annual ligament tear, herniated disc, spinal facet joint arthritis, intervertebral disc disease, spondylosis, painful scoliosis, or spinal stenosis. In some embodiments, the discogenic disease or disorder is discogenic pain.

[0977] In some embodiments, a method is provided for treating a discogenic disease or disorder by administering a therapeutically affective amount of a pharmaceutical composition comprising a CRISPR gene-editing system targeting the IL1RAP gene, as described herein, to a subject in need thereof. In some embodiments, the pharmaceutical composition comprises an LNP encapsuling an sgRNA having a crRNA sequence selected from SEQ ID NOs: 840-887 and a S. pyogenes Cas9 protein. In some embodiments, the crRNA sequence is selected from SEQ ID NOs: 840-864. In some embodiments, the crRNA sequence is selected from SEQ ID NOs: 840-849. In some embodiments, the pharmaceutical composition is administered by intradiscal injection.

[0978] In some embodiments, a method is provided for treating a musculoskeletal disease or disorder by administering a therapeutically affective amount of a pharmaceutical composition comprising a CRISPR gene-editing system targeting the IL1RAP gene, as described herein, to a subject in need thereof. In some embodiments, the musculoskeletal disease or disorder is Arthritis, Infectious Intermittent joint effusion, Ankylosing spondylitis, Arthritis, Osteoarthritis, Spondylarthritis, Plantar fasciitis, Degenerative polyarthritis, Hemophilic arthropathy, Inflammatory myopathy with abundant macrophages, or Polymyositis.

[0979] In yet other embodiments, a method is provided for treating an inflammatory disease or disorder by administering a therapeutically affective amount of a pharmaceutical composition comprising a CRISPR gene-editing system targeting the IL1RAP gene, as described herein, to a subject in need thereof. In some embodiments, the inflammatory disease or disorder is Autoinflammatory Disease (AID), Cryopyrin Associated Periodic syndrome (CAPS), Familial Mediterranean Fever (FMF), TNF-Receptor Associated Periodic Syndrome (TRAPS), Hyper-IgD Syndrome (HIDS), Systemic Lupus Erythematosus (SLE), or Fibrosis (general).

[0980] In certain embodiments, any region of an IL1RAP gene (e.g., 5′ untranslated region [UTR], exon 1, exon 2, exon 3, exon 4, exon 5, exon 6, exon 7, exon 8, exon 9, exon 10, exon 11, exon 12, exon 13, exon 14, exon 15, exon 16, exon 17, any intervening intronic regions, intron/exon junctions, the 3′ UTR, or polyadenylation signal) is targeted by an RNA-guided nuclease to alter the gene (see, e.g., FIG. 2A). In some embodiments, the IL1RAP gene targeted by an RNA-guided nuclease is from a mammal. In some embodiments, the IL1RAP gene targeted by an RNA-guided nuclease is from a human (hIL1RAP). In some embodiments, the IL1RAP gene targeted by an RNA-guided nuclease is from a dog (cIL1RAP). In some embodiments, the IL1RAP gene targeted by an RNA-guided nuclease is from a horse (eIL1RAP). In some embodiments, the IL1RAP gene targeted by an RNA-guided nuclease is from a cat (fIL1RAP).

### CCCC. IL1R1

[0981] In one aspect, methods and pharmaceutical compositions are provided for treating a back or spine condition or disorder by administering a therapeutically effective amount of a CRISPR pharmaceutical composition that targets an IL1R1 gene to a subject in need thereof.

[0982] In some embodiments, the CRISPR pharmaceutical composition comprises an RNA-guided nuclease and an sgRNA targeting the IL1R1 gene with a crRNA sequence selected from SEQ ID NOs: 806-839. In some embodiments, the crRNA sequence is selected from SEQ ID NOs: 806-830. In some embodiments, the crRNA sequence is selected from 806-815. In some embodiments, the RNA-guided nuclease is a Cas9 protein. In some embodiments, the Cas9 protein is an S. pyogenes Cas9 protein. In some embodiments, the S. pyogenes Cas9 protein comprises K848A, K1003A, and R1060A amino acid substitutions relative to the SpCas9 sequence of NCBI accession number 7S37_P. In some embodiments, the S. pyogenes Cas9 protein comprises an R691A amino acid substitution relative to the SpCas9 sequence of NCBI accession number 7S37_P.

[0983] In some embodiments, the CRISPR gene-editing system targeting the IL1R1 gene is delivered to a mammalian cell via viral vector. In some embodiments, the CRISPR gene-editing system targeting the IL1R1 gene is delivered to a mammalian cell via an AAV vector. In some embodiments, the CRISPR gene-editing system targeting the IL1R1 gene is delivered to a mammalian cell via a lentiviral vector. In some embodiments, the CRISPR gene-editing system targeting the IL1R1 gene is delivered to a mammalian cell via a lipid nanoparticle. In some embodiments, the CRISPR gene-editing system targeting the IL1R1 gene is delivered to a mammalian cell via a virus-like particle. In some embodiments, the CRISPR gene-editing system targeting the IL1R1 gene is delivered to a mammalian cell via a liposome. In some embodiments, the CRISPR gene-editing system targeting the IL1R1 gene is delivered to a mammalian cell via a lipid nanocrystal.

[0984] In some embodiments, the pharmaceutical composition comprises an sgRNA having a crRNA sequence selected from SEQ ID NOs: 806-839 and a S. pyogenes Cas9 protein, optionally comprising K848A, K1003A, and R1060A amino acid substitutions or an R691A amino acid substitution, encapsulated in i) a viral vector selected from an AAV vector and a lentiviral vector; ii) a lipid nanoparticle; iii) a virus-like particle; iv) a liposome; or v) a lipid nanocrystal. In some embodiments, the pharmaceutical composition comprises an sgRNA having a crRNA sequence selected from SEQ ID NOs: 806-839 and a S. pyogenes Cas9 protein encapsulated in a lipid nanoparticle.

[0985] In various embodiments, the pharmaceutical composition comprising a CRISPR gene-editing system targeting the IL1R1 gene is used in a method of treating a mammal in need thereof. In some embodiments, the method treats a discogenic disease or disorder. In some embodiments, the discogenic disease or disorder is low back pain, neck pain, lumbar pain, degenerative disc disease, discogenic pain annual ligament tear, herniated disc, spinal facet joint arthritis, intervertebral disc disease, spondylosis, painful scoliosis, or spinal stenosis. In some embodiments, the discogenic disease or disorder is discogenic pain.

[0986] Tn some embodiments, a method is provided for treating a discogenic disease or disorder by administering a therapeutically affective amount of a pharmaceutical composition comprising a CRISPR gene-editing system targeting the IL1R1 gene, as described herein, to a subject in need thereof. In some embodiments, the pharmaceutical composition comprises an LNP encapsuling an sgRNA having a crRNA sequence selected from SEQ ID NOs: 806-839 and a S. pyogenes Cas9 protein. In some embodiments, the crRNA sequence is selected from SEQ ID NOs: 806-830. In some embodiments, the crRNA sequence is selected from SEQ ID NOs: 806-815. In some embodiments, the pharmaceutical composition is administered by intradiscal injection.

[0987] In some embodiments, a method is provided for treating a musculoskeletal disease or disorder by administering a therapeutically affective amount of a pharmaceutical composition comprising a CRISPR gene-editing system targeting the IL1R1 gene, as described herein, to a subject in need thereof. In some embodiments, the musculoskeletal disease or disorder is Arthritis, Infectious Intermittent joint effusion, Ankylosing spondylitis, Arthritis, Osteoarthritis, Spondylarthritis, Plantar fasciitis, Degenerative polyarthritis, Hemophilic arthropathy, Inflammatory myopathy with abundant macrophages, or Polymyositis.

[0988] In yet other embodiments, a method is provided for treating an inflammatory disease or disorder by administering a therapeutically affective amount of a pharmaceutical composition comprising a CRISPR gene-editing system targeting the IL1R1 gene, as described herein, to a subject in need thereof. In some embodiments, the inflammatory disease or disorder is Autoinflammatory Disease (AID), Cryopyrin Associated Periodic syndrome (CAPS), Familial Mediterranean Fever (FMF), TNF-Receptor Associated Periodic Syndrome (TRAPS), Hyper-IgD Syndrome (HIDS), Systemic Lupus Erythematosus (SLE), or Fibrosis (general).

[0989] In certain embodiments, any region of an IL1R1 gene (e.g., 5′ untranslated region [UTR], exon 1, exon 2, exon 3, exon 4, exon 5, exon 6, exon 7, exon 8, exon 9, exon 10, exon 11, exon 12, exon 13, exon 14, exon 15, exon 16, exon 17, exon 18, exon 19, exon 20, exon 21, any intervening intronic regions, intron/exon junctions, the 3′ UTR, or polyadenylation signal) is targeted by an RNA-guided nuclease to alter the gene. In some embodiments, the IL1R1 gene targeted by an RNA-guided nuclease is from a mammal. In some embodiments, the IL1R1 gene targeted by an RNA-guided nuclease is from a human (hIL1R1). In some embodiments, the IL1R1 gene targeted by an RNA-guided nuclease is from a dog (cIL1R1). In some embodiments, the IL1R1 gene targeted by an RNA-guided nuclease is from a horse (eIL1R1). In some embodiments, the IL1R1 gene targeted by an RNA-guided nuclease is from a cat (fIL1R1).

### DDDD. IL1A

[0990] In one aspect, methods and pharmaceutical compositions are provided for treating a back or spine condition or disorder by administering a therapeutically effective amount of a CRISPR pharmaceutical composition that targets an IL1A gene to a subject in need thereof. In some embodiments, the CRISPR pharmaceutical composition comprises an RNA-guided nuclease and an sgRNA targeting the IL1A gene with a crRNA sequence selected from SEQ ID NOs: 769-786. In some embodiments, the crRNA sequence is selected from 769-778. In some embodiments, the RNA-guided nuclease is a Cas9 protein. In some embodiments, the Cas9 protein is an S. pyogenes Cas9 protein. In some embodiments, the S. pyogenes Cas9 protein comprises K848A, K1003A, and R1060A amino acid substitutions relative to the SpCas9 sequence of NCBI accession number 7S37_P. In some embodiments, the S. pyogenes Cas9 protein comprises an R691A amino acid substitution relative to the SpCas9 sequence of NCBI accession number 7S37_P.

[0991] In some embodiments, the CRISPR gene-editing system targeting the IL1A gene is delivered to a mammalian cell via viral vector. In some embodiments, the CRISPR gene-editing system targeting the IL1A gene is delivered to a mammalian cell via an AAV vector. In some embodiments, the CRISPR gene-editing system targeting the IL1A gene is delivered to a mammalian cell via a lentiviral vector. In some embodiments, the CRISPR gene-editing system targeting the IL1A gene is delivered to a mammalian cell via a lipid nanoparticle. In some embodiments, the CRISPR gene-editing system targeting the IL1A gene is delivered to a mammalian cell via a virus-like particle. In some embodiments, the CRISPR gene-editing system targeting the IL1A gene is delivered to a mammalian cell via a liposome. In some embodiments, the CRISPR gene-editing system targeting the IL1A gene is delivered to a mammalian cell via a lipid nanocrystal.

[0992] In some embodiments, the pharmaceutical composition comprises an sgRNA having a crRNA sequence selected from SEQ ID NOs: 769-786 and a S. pyogenes Cas9 protein, optionally comprising K848A, K1003A, and R1060A amino acid substitutions or an R691A amino acid substitution, encapsulated in i) a viral vector selected from an AAV vector and a lentiviral vector; ii) a lipid nanoparticle; iii) a virus-like particle; iv) a liposome; or v) a lipid nanocrystal. In some embodiments, the pharmaceutical composition comprises an sgRNA having a crRNA sequence selected from SEQ ID NOs: 769-786 and a S. pyogenes Cas9 protein encapsulated in a lipid nanoparticle.

[0993] In various embodiments, the pharmaceutical composition comprising a CRISPR gene-editing system targeting the IL1A gene is used in a method of treating a mammal in need thereof. In some embodiments, the method treats a discogenic disease or disorder. In some embodiments, the discogenic disease or disorder is low back pain, neck pain, lumbar pain, degenerative disc disease, discogenic pain annual ligament tear, herniated disc, spinal facet joint arthritis, intervertebral disc disease, spondylosis, painful scoliosis, or spinal stenosis. In some embodiments, the discogenic disease or disorder is discogenic pain.

[0994] In some embodiments, a method is provided for treating a discogenic disease or disorder by administering a therapeutically affective amount of a pharmaceutical composition comprising a CRISPR gene-editing system targeting the IL1A gene, as described herein, to a subject in need thereof. In some embodiments, the pharmaceutical composition comprises an LNP encapsuling an sgRNA having a crRNA sequence selected from SEQ ID NOs: 769-786 and a S. pyogenes Cas9 protein. In some embodiments, the crRNA sequence is selected from SEQ ID NOs: 769-778. In some embodiments, the pharmaceutical composition is administered by intradiscal injection.

[0995] In some embodiments, a method is provided for treating a musculoskeletal disease or disorder by administering a therapeutically affective amount of a pharmaceutical composition comprising a CRISPR gene-editing system targeting the IL1A gene, as described herein, to a subject in need thereof. In some embodiments, the musculoskeletal disease or disorder is Arthritis, Infectious Intermittent joint effusion, Ankylosing spondylitis, Arthritis, Osteoarthritis, Spondylarthritis, Plantar fasciitis, Degenerative polyarthritis, Hemophilic arthropathy, Inflammatory myopathy with abundant macrophages, or Polymyositis.

[0996] In yet other embodiments, a method is provided for treating an inflammatory disease or disorder by administering a therapeutically affective amount of a pharmaceutical composition comprising a CRISPR gene-editing system targeting the IL1A gene, as described herein, to a subject in need thereof. In some embodiments, the inflammatory disease or disorder is Autoinflammatory Disease (AID), Cryopyrin Associated Periodic syndrome (CAPS), Familial Mediterranean Fever (FMF), TNF-Receptor Associated Periodic Syndrome (TRAPS), Hyper-IgD Syndrome (HIDS), Systemic Lupus Erythematosus (SLE), or Fibrosis (general).

[0997] In certain embodiments, any region of an IL1A gene (e.g., 5′ untranslated region [UTR], exon 1, exon 2, exon 3, exon 4, exon 5, exon 6, exon 7, exon 8, any intervening intronic regions, intron/exon junctions, the 3′ UTR, or polyadenylation signal) is targeted by an RNA-guided nuclease to alter the gene (see, e.g., FIG. 2A). In some embodiments, the IL1A gene targeted by an RNA-guided nuclease is from a mammal. In some embodiments, the IL1A gene targeted by an RNA-guided nuclease is from a human (hIL1A). In some embodiments, the IL1A gene targeted by an RNA-guided nuclease is from a dog (cIL1A). In some embodiments, the IL1A gene targeted by an RNA-guided nuclease is from a horse (eIL1A). In some embodiments, the IL1A gene targeted by an RNA-guided nuclease is from a cat (fIL1A).

### EEEE. IL1B

[0998] In one aspect, methods and pharmaceutical compositions are provided for treating a back or spine condition or disorder by administering a therapeutically effective amount of a CRISPR pharmaceutical composition that targets an IL1B gene to a subject in need thereof. In some embodiments, the CRISPR pharmaceutical composition comprises an RNA-guided nuclease and an sgRNA targeting the IL1B gene with a crRNA sequence selected from SEQ ID NOs: 787-805. In some embodiments, the crRNA sequence is selected from 787-796. In some embodiments, the RNA-guided nuclease is a Cas9 protein. In some embodiments, the Cas9 protein is an S. pyogenes Cas9 protein. In some embodiments, the S. pyogenes Cas9 protein comprises K848A, K1003A, and R1060A amino acid substitutions relative to the SpCas9 sequence of NCBI accession number 7S37_P. In some embodiments, the S. pyogenes Cas9 protein comprises an R691A amino acid substitution relative to the SpCas9 sequence of NCBI accession number 7S37_P.

[0999] In some embodiments, the CRISPR gene-editing system targeting the IL1B gene is delivered to a mammalian cell via viral vector. In some embodiments, the CRISPR gene-editing system targeting the IL1B gene is delivered to a mammalian cell via an AAV vector. In some embodiments, the CRISPR gene-editing system targeting the IL1B gene is delivered to a mammalian cell via a lentiviral vector. In some embodiments, the CRISPR gene-editing system targeting the IL1B gene is delivered to a mammalian cell via a lipid nanoparticle. In some embodiments, the CRISPR gene-editing system targeting the IL1B gene is delivered to a mammalian cell via a virus-like particle. In some embodiments, the CRISPR gene-editing system targeting the IL1B gene is delivered to a mammalian cell via a liposome. In some embodiments, the CRISPR gene-editing system targeting the IL1B gene is delivered to a mammalian cell via a lipid nanocrystal.

[1000] In some embodiments, the pharmaceutical composition comprises an sgRNA having a crRNA sequence selected from SEQ ID NOs: 787-805 and a S. pyogenes Cas9 protein, optionally comprising K848A, K1003A, and R1060A amino acid substitutions or an R691A amino acid substitution, encapsulated in i) a viral vector selected from an AAV vector and a lentiviral vector; ii) a lipid nanoparticle; iii) a virus-like particle; iv) a liposome; or v) a lipid nanocrystal. In some embodiments, the pharmaceutical composition comprises an sgRNA having a crRNA sequence selected from SEQ ID NOs: 787-805 and a S. pyogenes Cas9 protein encapsulated in a lipid nanoparticle.

[1001] In various embodiments, the pharmaceutical composition comprising a CRISPR gene-editing system targeting the IL1B gene is used in a method of treating a mammal in need thereof. In some embodiments, the method treats a discogenic disease or disorder. In some embodiments, the discogenic disease or disorder is low back pain, neck pain, lumbar pain, degenerative disc disease, discogenic pain annual ligament tear, herniated disc, spinal facet joint arthritis, intervertebral disc disease, spondylosis, painful scoliosis, or spinal stenosis. In some embodiments, the discogenic disease or disorder is discogenic pain.

[1002] In some embodiments, a method is provided for treating a discogenic disease or disorder by administering a therapeutically affective amount of a pharmaceutical composition comprising a CRISPR gene-editing system targeting the IL1B gene, as described herein, to a subject in need thereof. In some embodiments, the pharmaceutical composition comprises an LNP encapsuling an sgRNA having a crRNA sequence selected from SEQ ID NOs: 787-805 and a S. pyogenes Cas9 protein. In some embodiments, the crRNA sequence is selected from SEQ ID NOs: 787-796. In some embodiments, the pharmaceutical composition is administered by intradiscal injection.

[1003] In some embodiments, a method is provided for treating a musculoskeletal disease or disorder by administering a therapeutically affective amount of a pharmaceutical composition comprising a CRISPR gene-editing system targeting the IL1B gene, as described herein, to a subject in need thereof. In some embodiments, the musculoskeletal disease or disorder is Arthritis, Infectious Intermittent joint effusion, Ankylosing spondylitis, Arthritis, Osteoarthritis, Spondylarthritis, Plantar fasciitis, Degenerative polyarthritis, Hemophilic arthropathy, Inflammatory myopathy with abundant macrophages, or Polymyositis.

[1004] In yet other embodiments, a method is provided for treating an inflammatory disease or disorder by administering a therapeutically affective amount of a pharmaceutical composition comprising a CRISPR gene-editing system targeting the IL1B gene, as described herein, to a subject in need thereof. In some embodiments, the inflammatory disease or disorder is Autoinflammatory Disease (AID), Cryopyrin Associated Periodic syndrome (CAPS), Familial Mediterranean Fever (FMF), TNF-Receptor Associated Periodic Syndrome (TRAPS), Hyper-IgD Syndrome (HIDS), Systemic Lupus Erythematosus (SLE), or Fibrosis (general).

[1005] In certain embodiments, any region of an IL1B gene (e.g., 5′ untranslated region [UTR], exon 1, exon 2, exon 3, exon 4, exon 5, exon 6, exon 7, exon 8, any intervening intronic regions, intron/exon junctions, the 3′ UTR, or polyadenylation signal) is targeted by an RNA-guided nuclease to alter the gene (see, e.g., FIG. 2A). In some embodiments, the IL1B gene targeted by an RNA-guided nuclease is from a mammal. In some embodiments, the IL1B gene targeted by an RNA-guided nuclease is from a human (hIL1B). In some embodiments, the IL1B gene targeted by an RNA-guided nuclease is from a dog (cIL1B). In some embodiments, the IL1B gene targeted by an RNA-guided nuclease is from a horse (eIL1B). In some embodiments, the IL1B gene targeted by an RNA-guided nuclease is from a cat (fIL1B).

### VII. Administration Routes

[1006] The methods and compositions herein described encompass the use of pharmaceutical compositions comprising a CRISPR gene-editing system as an active ingredient.

[1007] Depending on the method/route of administration, pharmaceutical dosage forms come in several types. These include many kinds of liquid, solid, and semisolid dosage forms. Common pharmaceutical dosage forms include pill, tablet, or capsule, drink or syrup, and natural or herbal form such as plant or food of sorts, among many others. Notably, the route of administration (ROA) for drug delivery is dependent on the dosage form of the substance in question. A liquid pharmaceutical dosage form is the liquid form of a dose of a chemical compound used as a drug or medication intended for administration or consumption.

[1008] As described below, a composition of the present disclosure can be delivered to a subject subcutaneously (e.g., intra-articular or intradiscal injection), dermally (e.g., transdermally via patch), and/or via implant. Exemplary pharmaceutical dosage forms include, e.g., pills, osmotic delivery systems, elixirs, emulsions, hydrogels, suspensions, syrups, capsules, tablets, orally dissolving tablets (ODTs), gel capsules, thin films, adhesive topical patches, lollipops, lozenges, chewing gum, dry powder inhalers (DPIs), vaporizers, nebulizers, metered dose inhalers (MDIs), ointments, transdermal patches, intradermal implant.

[1009] As used herein, “dermal delivery” or “dermal administration” can refer to a route of administration wherein the pharmaceutical dosage form is taken to, or through, the dermis (i.e., layer of skin between the epidermis (with which it makes up the cutis) and subcutaneous tissues). “Subcutaneous delivery” can refer to a route of administration wherein the pharmaceutical dosage form is to or beneath the subcutaneous tissue layer.

[1010] Methods of formulating suitable pharmaceutical compositions are known in the art, see, e.g., Remington: The Science and Practice of Pharmacy, 21st ed., 2005; and the books in the series Drugs and the Pharmaceutical Sciences: a Series of Textbooks and Monographs (Dekker, N.Y.). For example, solutions or suspensions used for parenteral, intradermal, or subcutaneous application can include the following components: a sterile diluent such as water for injection, saline solution, fixed oils, polyethylene glycols, glycerin, propylene glycol or other synthetic solvents; antibacterial agents such as benzyl alcohol or methyl parabens; antioxidants such as ascorbic acid or sodium bisulfate; chelating agents such as ethylenediaminetetraacetic acid; buffers such as acetates, citrates or phosphates and agents for the adjustment of tonicity such as sodium chloride or dextrose. pH can be adjusted with acids or bases, such as hydrochloric acid or sodium hydroxide. The parenteral preparation can be enclosed in ampoules, disposable syringes or multiple dose vials made of glass or plastic.

[1011] Pharmaceutical compositions suitable for injectable use can include sterile aqueous solutions (where water soluble) or dispersions and sterile powders for the extemporaneous preparation of sterile injectable solutions or dispersion. For intravenous administration, suitable carriers include physiological saline, bacteriostatic water, Cremophor EL™ (BASF, Parsippany, N.J.) or phosphate buffered saline (PBS). In all cases, the composition must be sterile and should be fluid to the extent that easy syringability exists. It should be stable under the conditions of manufacture and storage and must be preserved against the contaminating action of microorganisms such as bacteria and fungi. The carrier can be a solvent or dispersion medium containing, for example, water, ethanol, polyol (for example, glycerol, propylene glycol, and liquid polyethylene glycol, and the like), and suitable mixtures thereof. The proper fluidity can be maintained, for example, by the use of a coating such as lecithin, by the maintenance of the required particle size in the case of dispersion and by the use of surfactants. Prevention of the action of microorganisms can be achieved by various antibacterial and antifungal agents, for example, parabens, chlorobutanol, phenol, ascorbic acid, thimerosal, and the like. In many cases, it will be preferable to include isotonic agents, for example, sugars, polyalcohols such as mannitol, sorbitol, sodium chloride in the composition. Prolonged absorption of the injectable compositions can be brought about by including in the composition an agent that delays absorption, for example, aluminum monostearate and gelatin.

[1012] Sterile injectable solutions can be prepared by incorporating the active compound in the required amount in an appropriate solvent with one or a combination of ingredients enumerated above, as required, followed by filtered sterilization. Generally, dispersions are prepared by incorporating the active compound into a sterile vehicle, which contains a basic dispersion medium and the required other ingredients from those enumerated above. In the case of sterile powders for the preparation of sterile injectable solutions, the preferred methods of preparation are vacuum drying and freeze-drying, which yield a powder of the active ingredient plus any additional desired ingredient from a previously sterile-filtered solution thereof.

[1013] Therapeutic compounds that are or include nucleic acids can be administered by any method suitable for administration of nucleic acid agents, such as a DNA vaccine. These methods include gene guns, bio injectors, and skin patches as well as needle-free methods such as the micro-particle DNA vaccine technology disclosed in U.S. Pat. No. 6,194,389, and the mammalian transdermal needle-free vaccination with powder-form vaccine as disclosed in U.S. Pat. No. 6,168,587. Additionally, intranasal delivery is possible, as described in, inter alia, Hamajima et al., Clin. Immunol. Immunopathol., 88(2), 205-10 (1998). Liposomes (e.g., as described in U.S. Pat. No. 6,472,375) and microencapsulation can also be used. Biodegradable targetable microparticle delivery systems can also be used (e.g., as described in U.S. Pat. No. 6,471,996).

[1014] Therapeutic compounds can be prepared with carriers that will protect the therapeutic compounds against rapid elimination from the body, such as a controlled release formulation, including implants and microencapsulated delivery systems. Biodegradable, biocompatible polymers can be used, such as collagen, ethylene vinyl acetate, polyanhydrides (e.g., poly[1,3-bis(carboxyphenoxy)propane-co-sebacic-acid] (PCPP-SA) matrix, fatty acid dimer-sebacic acid (FAD-SA) copolymer, poly(lactide-co-glycolide)), polyglycolic acid, collagen, polyorthoesters, polyethylene glycol-coated liposomes, hyaluronic acid and polylactic acid. Such formulations can be prepared using standard techniques, or obtained commercially, e.g., from Alza Corporation and Nova Pharmaceuticals, Inc. Liposomal suspensions (including liposomes targeted to selected cells with monoclonal antibodies to cellular antigens) can also be used as pharmaceutically acceptable carriers. These can be prepared according to methods known to those skilled in the art, for example, as described in U.S. Pat. No. 4,522,811. Semisolid, gelling, soft-gel, or other formulations (including controlled release) can be used, e.g., when administration to a surgical site is desired. Methods of making such formulations are known in the art and can include the use of biodegradable, biocompatible polymers. See, e.g., Sawyer et al., Yale J Biol Med. 2006 December; 79(3-4): 141-152.

[1015] The pharmaceutical compositions described herein may be included in a container, kit, pack, or dispenser together with instructions for administration.

### A. Systemic Administration

[1016] In some embodiments, a pharmaceutical composition comprising a CRISPR gene-editing system is administered systemically to a mammal in need thereof. In some embodiments, the composition is formulated for intravenous injection. In some embodiments, the composition is formulated for oral administration. In some embodiments, the composition is formulated for parenteral administration.

### B. Local Administration

[1017] In some embodiments, a pharmaceutical composition comprising a CRISPR gene-editing system is administered locally to a mammal in need thereof. In some embodiments, the local administration is an intra-articular injection. In some embodiments, the composition is formulated for intradiscal injection as described in, for instance, Migliore, A., et al. (2020). Therapeutics and Clinical Risk Management, 953-968, which is hereby incorporated by reference in its entirety for all purposes. In some embodiments, the composition is formulated for epidural injection as described in, for instance, Manchikanti, L., et al. (2021). Pain Physician, 24(6), 425, which is hereby incorporated by reference in its entirety for all purposes. In some embodiments, the composition is formulated for peridiscal injection. In some embodiments, the composition is formulated for perivertebral injection. In some embodiments, composition is formulated for administration to the facet joints of the spine.

[1018] In some embodiments, a pharmaceutical composition comprising a CRISPR gene-editing system is administered locally to a mammal in need thereof during a surgical procedure. In some embodiments, a pharmaceutical composition comprising a CRISPR gene-editing system is administered locally to a mammal in need thereof 1, 2, 3, 4, 5, 6, 7, 8, 9, 10, 20, or 30 days after a surgical procedure.

[1019] In some embodiments the administration route is intradiscal injection of a pharmaceutical compositions comprising a CRISPR gene-editing system for treatment of a mammal in need thereof, wherein the CRISPR gene-editing system targets a gene selected from (i) one or more growth factors or growth factor receptors (e.g., FGF2, CCN2, NGF, NTF3, NTF4, BDNF, FGFR1, NGFR, NTRK1, or NTRK2), (ii) one or more metalloproteases or regulators thereof (e.g., ADAM17, ADAMTS1, ADAMTS5, MMP1, MMP2, MMP3, MMP7, MMP8, MMP10, MMP12, MMP13, TIMP1, or TIMP3), (iii) one or more cytokines, chemokines or cytokine/chemokine receptors (e.g., CXCL1, CXCL2, CXCL3, CXCL5, CXCL6, CXCL8, CCL2, CCL3, CCL5, CCL7, CCL20, IL1A, IL1B, IL4, IL6, IL6ST, IL10, IL13, IL17A, IL18, TNF, CXCR1, CXCR2, CCR7, TNFRSF1A, TNFRSF1B, IL1R1, IL1RAP, IL4R, IL6R, IL10RA, IL10RB, IL13RA1, IL13RA2, IL17RA, IL18R1, or IL18RAP), (iv) one or more regulators of neuronal signaling (e.g., SCN1A, SCN2A, SCN3A, SCN4A, SCN5A, SCN8A, SCN9A, SCN10A, SCN11A, TAC1, TAC3, TACR1, TACR2, TACR3, or ATP1A1), (v) one or more other regulators of cell signaling (e.g., CALCA, CALCB, CALCRL, RAMP1, ADM, CRCP, YAP1, MRGPRX2), or (vi) a combination of any genes of (i)-(v). In some embodiments, the mammal is selected from a human, a dog, a horse, and a cat.

[1020] In some embodiments the administration route is epidural injection of a pharmaceutical compositions comprising a CRISPR gene-editing system for treatment of a mammal in need thereof, wherein the CRISPR gene-editing system targets a gene selected from (i) one or more growth factors or growth factor receptors (e.g., FGF2, CCN2, NGF, NTF3, NTF4, BDNF, FGFR1, NGFR, NTRK1, or NTRK2), (ii) one or more metalloproteases or regulators thereof (e.g., ADAM17, ADAMTS1, ADAMTS5, MMP1, MMP2, MMP3, MMP7, MMP8, MMP10, MMP12, MMP13, TIMP1, or TIMP3), (iii) one or more cytokines, chemokines or cytokine/chemokine receptors (e.g., CXCL1, CXCL2, CXCL3, CXCL5, CXCL6. CXCL8, CCL2, CCL3, CCL5, CCL7, CCL20, IL1A, IL1B, IL4, IL6, IL6ST, IL10, IL13, IL17A, IL18, TNF, CXCR1, CXCR2, CCR7, TNFRSF1A, TNFRSF1B, IL1R1, IL1RAP, IL4R, IL6R, IL10RA, IL10RB, IL13RA1, IL13RA2, IL17RA, IL18R1, or IL18RAP), (iv) one or more regulators of neuronal signaling (e.g., SCN1A, SCN2A, SCN3A, SCN4A, SCN5A, SCN8A, SCN9A, SCN10A, SCN11A, TAC1, TAC3, TACR1, TACR2, TACR3, or ATP1A1), (v) one or more other regulators of cell signaling (e.g., CALCA, CALCB, CALCRL, RAMP1, ADM, CRCP, YAP1, MRGPRX2), or (vi) a combination of any genes of (i)-(v). In some embodiments, the mammal is selected from a human, a dog, a horse, and a cat.

[1021] In some embodiments the administration route is peridiscal injection of a pharmaceutical compositions comprising a CRISPR gene-editing system for treatment of a mammal in need thereof, wherein the CRISPR gene-editing system targets a gene selected from (i) one or more growth factors or growth factor receptors (e.g., FGF2, CCN2, NGF, NTF3, NTF4, BDNF, FGFR1, NGFR, NTRK1, or NTRK2), (ii) one or more metalloproteases or regulators thereof (e.g., ADAM17, ADAMTS1, ADAMTS5, MMP1, MMP2, MMP3, MMP7, MMP8. MMP10, MMP12, MMP13, TIMP1, or TIMP3), (iii) one or more cytokines, chemokines or cytokine/chemokine receptors (e.g., CXCL1, CXCL2, CXCL3, CXCL5, CXCL6, CXCL8, CCL2, CCL3, CCL5, CCL7, CCL20, IL1A, IL1B, IL4, IL6, IL6ST, IL10, IL13, IL17A, IL18, TNF, CXCR1, CXCR2, CCR7, TNFRSF1A, TNFRSF1B, IL1R1, IL1RAP, IL4R, IL6R, IL10RA, IL10RB, IL13RA1, IL13RA2, IL17RA, IL18R1, or IL18RAP), (iv) one or more regulators of neuronal signaling (e.g., SCN1A, SCN2A, SCN3A, SCN4A, SCN5A, SCN8A, SCN9A, SCN10A, SCN11A, TAC1, TAC3, TACR1, TACR2, TACR3, or ATP1A1), (v) one or more other regulators of cell signaling (e.g., CALCA, CALCB, CALCRL, RAMP1, ADM, CRCP, YAP1, MRGPRX2), or (vi) a combination of any genes of (i)-(v). In some embodiments, the mammal is selected from a human, a dog, a horse, and a cat.

[1022] In some embodiments the administration route is perivertebral injection of a pharmaceutical compositions comprising a CRISPR gene-editing system for treatment of a mammal in need thereof, wherein the CRISPR gene-editing system targets a gene selected from (i) one or more growth factors or growth factor receptors (e.g., FGF2, CCN2, NGF, NTF3, NTF4, BDNF, FGFR1, NGFR, NTRK1, or NTRK2), (ii) one or more metalloproteases or regulators thereof (e.g., ADAM17, ADAMTS1, ADAMTS5, MMP1, MMP2, MMP3, MMP7, MMP8. MMP10, MMP12, MMP13, TIMP1, or TIMP3), (iii) one or more cytokines, chemokines or cytokine/chemokine receptors (e.g., CXCL1, CXCL2, CXCL3, CXCL5, CXCL6, CXCL8, CCL2, CCL3, CCL5, CCL7, CCL20, IL1A, IL1B, IL4, IL6, IL6ST, IL10, IL13, IL17A, IL18, TNF, CXCR1, CXCR2, CCR7, TNFRSF1A, TNFRSF1B, IL1R1, IL1RAP, IL4R, IL6R, IL10RA, IL10RB, IL13RA1, IL13RA2, IL17RA, IL18R1, or IL18RAP), (iv) one or more regulators of neuronal signaling (e.g., SCN1A, SCN2A, SCN3A, SCN4A, SCN5A, SCN8A, SCN9A, SCN10A, SCN11A, TAC1, TAC3, TACR1, TACR2, TACR3, or ATP1A1), (v) one or more other regulators of cell signaling (e.g., CALCA, CALCB, CALCRL, RAMP1, ADM, CRCP, YAP1, MRGPRX2), or (vi) a combination of any genes of (i)-(v). In some embodiments, the mammal is selected from a human, a dog, a horse, and a cat.

### EXAMPLES

[1023] The embodiments encompassed herein are now described with reference to the following examples. These examples are provided for the purpose of illustration only and the disclosure encompassed herein should in no way be construed as being limited to these examples, but rather should be construed to encompass any and all variations which become evident as a result of the teachings provided herein.

### Example 1: Design and Selection of Guides for Editing the IL1 Receptor (IL1R1)

[1024] A pipeline of in-silico and in-vitro screening was developed to identify candidate CRISPR-Cas guides for gene editing. The pipeline was applied to identify guides that effectively edit the canine IL1R1 receptor gene (cIL1R1), thereby disrupting IL1α/IL1β signaling in vivo. The first step in the pipeline was to identify all possible crRNA sequences for a particular CRISPR-Cas protein in the coding portions of the cIL1R1. Many algorithms for identifying such sequences are known in the art. Generally, these algorithms function by identifying a protospacer adjacent motif (PAM) sequence for the particular CRISPR-Cas protein and then locate the sequence spaced according to the requirements of the particular Cas protein, typically directly 5′ of the PAM site. For example, the S. pyogenes Cas9 (SpCas9) protein, which was used in this Example, recognizes a 5′-NGG-3′ PAM sequence. Thus, all sequences directly 5′ of an NGG trinucleotide are possible crRNA sequences, crRNA sequences identified in this fashion as shown in, e.g., FIGS. 79-87, along with biographical information about the crRNA sequence.

[1025] Next, each identified crRNA sequence was evaluated across three different metrics: possible off-target editing at locations in the genome other than the target gene, on-target editing efficiency, and the likelihood of editing causing frameshift mutations, using multiple algorithms for each metric, as illustrated in FIG. 90A. The basis of the combinatorial approach used lies in the assumption that every model has blind spots that may skew the fitness of a particular guide RNA. Weighting these scores to obtain a consensus score for each of these properties allows for much better prediction of sgRNA fitness.

[1026] Off-target editing effects were predicted by averaging scores generated by the MIT, CFD and Elevation (human only) model. The MIT algorithm, also known as Hsu-Zhang score. Hsu, P. D. et al. (2013). Nature Biotechnology 31, 827-832. This model is based on a positional penalty matrix (1×20) generated from 15 EMX1 sgRNA libraries with mismatches against target at every position. The CFD algorithm (Cutting Frequency Determination) is based on threat matrix (12×20) considering both position and mismatch type and PAM integrity (27,897 ‘CD33’ sgRNAs+10,618 negative control sgRNAs). Doench, J. G. et al. (2016). Nature Biotechnology 34, 184-191. The Elevation score using machine learning algorithms trained by genome-wide (GUIDE-Seq) and other aggregated off-target profiling data. Listgarten, J. et al. (2018). Nature Biomedical Engineering 2, 38-47. The column labelled “OFF” shows the mean of the scores provided by the two or three models, respectively. The column labelled “OffTarget #” shows the number of potential off-targets with up to four mismatches as calculated by CRISPOR. See, Haeussler, M. et al. (2016). Genome Biology 17, 148.

[1027] On-target editing efficiencies were predicted by averaging scores generated by the Azimuth model, the DeepSpCas9 model, and the CRISPRScan model. The Azimuth model is a boosted regression tree model, trained with 881 sgRNAs (MOLM13/NB4/TF1 cells and additional unpublished data) delivered by lentivirus. Doench, J. G. et al. (2016). Nature Biotechnology 34, 184-191. DeepSpCas9 is a deep learning model trained using editing data from 12,832 sgRNA. Kim, H. K. et al. (2019). Science Advances 5(11). CRISPRscan is a linear regression model, trained using editing data from 1000 sgRNAs injected into zebrafish embryos targeting >100 genes. Moreno-Mateos, M. A. et al. (2015). Nature Methods 12, 982-988. The column labelled “ON” shows the mean of the scores provided by the three models.

[1028] The putative guides' potential to generate frameshift mutations were predicted by averaging scores generated by the Lindel model and the InDelphi model. Lindel is a machine learning model trained using profile data of 1.16 million independent mutational events triggered by CRISPR/Cas9-mediated cleavage and non-homologous end joining-mediated double strand break repair of 6872 synthetic target sequences, introduced into a human cell line via lentiviral infection. Chen, W. et al. (2019). Nucleic Acids Research 47, 7989-8003. InDelphi is machine learning model trained with indels generated by 1872 sgRNAs. Shen, M. W. et al. (2018). Nature 563, 646-651 (2018). The column labelled “Frameshift” shows the mean of the scores provided by the two models. The column labelled “Precision” shows the frequency distribution of indels estimated by inDelphi. High precision is closer to 100 and represents sgRNAs that are characterised by one or a very low number of repair outcomes.

[1029] The candidate crRNA sequences were then evaluated for the presence of Graf motifs, TT or GCC present in the 4 PAM proximal bases of the crRNA sequence, as indicated in, e.g., FIGS. 79-87, as either TT or GCC. Graf, R. et al. (2019). Cell Reports 26(5), 1098-103. Graf et al. reported that TT- and GCC-motifs are a hallmark of inefficient sgRNAs. If possible, crRNA with Graf motifs and in particular the GCC motif were avoided. In contrast to the TT motif, the GCC motif remains critical if sgRNAs are synthesized de novo rather than by transcription.

[1030] As shown in, e.g., FIGS. 79-87, three consensus scores were then calculated for each crRNA sequence. The “ON-OFF” score represents the mean of the “ON” and “OFF” score. The “OFF-FS” score represents the mean of the “OFF” and “Frameshift” score. The OVERALL score represents the mean of the “ON”, “OFF” and “Frameshift” score. Additionally, for human only, VBC's Bioscore was used to predict whether a possible in-frame mutation could disturb protein function. This is more likely to occur in conserved genomic DNA sequences coding for critical protein domains. Thus, Bioscore is based on protein domain annotations, phylogenetic conservation, amino acid identities and exon size. Michlits, G. et al. (2020). Nature Methods 17, 708-716. The final criteria for selecting candidates is mainly based on the OVERALL score (in most cases >70), the relative low counts of potential off-targets (in most cases <200 off-targets), the absence of Graf motifs (if possible) and the genomic cut position within the coding sequence to produce knockouts or truncated proteins with reduced functionality (e.g. decoy receptors),

[1031] Finally, the IL1R1 domain in which each crRNA guides editing was determined based on the nucleotide position in the gene. The domain location is used to predict whether the edit will result in a wild-type like protein (edits in the sequence encoding the extreme C-terminus of a receptor that are unlikely to disrupt receptor-mediated signaling), complete knock-out of any functional protein (edits in the sequence encoding the N-terminus and/or essential functional domains), a soluble decoy receptor (edits in the sequence encoding the transmembrane domain of the receptor), or a membrane-bound decoy receptor (edits in the sequence encoding the intracellular signaling domain of the receptor).

[1032] Indeed, this in silico analysis established that several candidate sgRNAs were predicted to yield genomic edits that would create a dominant negative (DN) IL1R1, thereby impacting intracellular pro-inflammatory signaling (FIG. 90A). In support of the robustness of these analyses, structural predictions also demonstrated that editing with these particular sgRNAs would yield an expressible form of IL1R1 protein (either soluble or membrane-bound) that cannot induce the ligand's signal (FIG. 90B). Taken together, these predictive studies demonstrated the feasibility of inducing a dominant negative canine IL1 receptor as a unique approach to tamping down inflammation in cells and provided a high-throughput method for validating candidates without the need for time- and resource-intensive brute force methods.

### Example 2: Validation of DN IL1R1 In Canine Cells

[1033] Having designed and analyzed numerous sgRNA candidates that were predicted to edit IL1 receptor to produce a dominant negative reception, the next step was to assess their ability to act in vitro. Of particular interest is whether the preferred (i.e., on-target) edit would be observed in edited cells.

[1034] To test this, 80 pmoles of sgRNA candidates were introduced into canine DH82 monocytes via electroporation as part of a ribonucleoprotein (i.e., pre-assembled with 25 pmoles of SpCas9 protein at room temperature for at least 5 min). In brief, around 600,000 cells resuspended in 20 μl PKM buffer (2.7 mM KCl, 137 mM NaCl, 10 mM Na2HPO4/1.8 mM NaH2PO4 (pH 7.4) and 50 mM D-Mannitol) were added to the pre-assembled SpCas9 ribonucleoprotein complex, transferred into 16-well nucleocuvettes and electroporated with pulse code CM-137 using the 4D nucleofector (Lonza). Electroporated cells were kept in PKM buffer for about 10 min before transferring them into 6-well tissue culture plates with complete culture media. After 2-5 days in culture, cells were dissociated for genomic DNA extraction using the DNeasy Blood & Tissue Kit (Qiagen). sgRNA target regions were amplified by PCR and editing efficacy was then deduced from Sanger sequencing traces using Inference of CRISPR Edits (ICE v1.2). See, Conant, D. et al. (2022). The CRISPR Journal 5(1), 123-130.

[1035] While multiple candidates were indeed able to induce mutation in the IL1R1 gene at high efficiency-including several exhibiting frequencies above 95%-two lead candidates exhibited the ability to consistently induce the same on-target edit in a high percentage of cells (FIG. 91). These results confirmed the robustness of the in silico analysis and suggested that at least OCR13 and OCR14 are able to produced DN IL1 receptors in canine cells.

### Example 3: Impact of Cas9 Mutants with Enhanced Specificity

[1036] With the ultimate aim to eliminate off-target editing without sacrificing on-target activity, the lead candidate sgRNAs were assembled with different high-fidelity SpCas9 variants (i.e. mutated SpCas9 nucleases with enhanced specificity; see generally, Slaymaker, I. M. et al (2016). Science 351(6268), 84-88; Vakulskas, C. A. et al. (2018). Nature Medicine 24(8), 1216-1224) and assessed for frameshift efficacy and precision (i.e. the primacy for single or low number of repair outcomes) in canine DH82 monocytes.

[1037] Among the high-fidelity SpCas9 nucleases, AR-Cas9 (IDT, Catalogue #1081060; Vakulskas, C. A. et al. (2018). Nature Medicine 24(8), 1216-1224) performed best overall with the lead candidate sgRNAs. In comparison to wild-type SpCas9 (WT-Cas9), AR-Cas9 reached similarly high frameshift efficacy (>97%) and precision (>83%) when paired with OCR13 (FIG. 92A) and OCR14 (FIG. 92B). The other high-fidelity Cas9 nucleases tested were ES-Cas9 (Growth Factory, eSpCas9 (1.1); Slaymaker, I. M. et al (2016). Science 351(6268), 84-88), HF-Cas9 (Invitrogen, Catalogue #A50576) and PE-Cas9 (Merck Life Science, Catalogue #PECAS9-250).

[1038] However, AR-Cas9 like all other high-fidelity SpCas9 nucleases (ES-Cas9, PE-Cas9 and HF-Cas9) showed decreased editing efficacy with OCR06, as compared to a combination with WT-Cas9 (FIG. 92C). Also, OCR10, which exhibits high precision with WT-Cas9, gives rise to a second frameshift edit at frequency 20-30% with all tested high-fidelity SpCas9 nucleases (FIG. 92D). These results, taken as a whole, suggested that pairings between high-fidelity RNA-dependent nuclease and sgRNA would likely need to be done on a case-by-case basis.

### Example 4: Design for IL1RAP/IL1RAP Decoy Proteins

[1039] IL1RAP is the co-receptor of all IL1 ligands, including IL33, which activates the IL1RL1/IL1RAP receptor dimer rather than the IL1A/B-specific IL1R1/IL1RAP. Thus, like other IL1R complex proteins, IL1RAP may be another potent mediator of inflammation that can be exploited for therapeutic purposes.

[1040] To test this, 10 candidate sgRNAs were designed to target different exons of canine IL1RAP with the objective to either ablate IL1RAP expressing (OCP01 to OCP06) or generate decoy IL1RAP proteins that will not transduce a pro-inflammatory signal (OCP07 to OCP10) (FIG. 93A). For example, OCP07 is predicted to predominantly produce an A duplication in exon 9 of IL1RAP, which shifts the open reading frame at position 355. At the protein level, this causes a Threonine (T) to Asparagine (N) amino acid change and prematurely terminates translation at position 395. Based on AlphaFold2-generated models, this +1 frameshift converts IL1RAP into a soluble IL1RAP decoy (IL1RAP_{T355NfsTer41}) missing the transmembrane and the cytoplasmic TIR domain (FIG. 93B).

[1041] Having done the predictive analysis, the next step was to assess performance in vitro. Candidate sgRNAs were paired with wild-typeSpCas9 (WT-Cas9) and introduced into canine DH82 monocytes via electroporation and editing efficacy and precision assessed by ICE. As predicted with an OVERALL score of 82, OCP02 performed best among the knockout candidates with virtually 100% KO rate due to a single C deletion introducing a premature stop codon at position 32 (M32*) (FIG. 94). All decoy-producing sgRNA candidates exhibited strong editing efficacy (greater than 95%). OCP09 and OCP10 demonstrated the strongest editing primacy with the top edit reaching 89% and 95%, respectively.

### Example 5: Editing of IL1RAP/IL1RAP in Various Canine Cell Types with High Fidelity Nucleases

[1042] Having designed and validated numerous guides targeting IL1RAP, the next step was to validate them with high-fidelity SpCas9 nuclease to mitigate potential off-target effects during the editing process. To do this, one or two sgRNAs with the strongest frameshift scores (FIG. 95A) for each type of interference (e.g., knockout or decoy receptor) were selected and paired with different high-fidelity SpCas9 nucleases to see which, if any, would show similar on-target activity to wild-type SpCas9 (WT-Cas9), while potentially reducing undesirable off-target effects.

[1043] Indeed, for each selected sgRNA, the editing efficacy in canine DH82 monocytes remained strongly dependent upon which high-fidelity SpCas9 nuclease was used (FIG. 95B). Notably, AR-Cas9 most consistently showed high frequency of the desired edit in canine IL1RAP. This was particularly true in the case of OCP02, OCP07, and OCP10. However, this effect was not universal, as the frameshift score for OCP09 was decreased when paired with AR-Cas9. OCP02, OCP07 and OCP10 also performed well in a head-to-head comparison of WT-Cas9 and AR-Cas9 in canine synovial fibroblasts (FIG. 95C). As such, high-fidelity RNA-dependent nucleases appeared to generally impact editing efficiency, though the magnitude of such effects will likely vary depending upon the nuclease used and to a lesser extent the cell type to be edited.

[1044] Having observed strong on-target activity when pairing sgRNA with high-fidelity SpCas9 nucleases, the next step involved expansion of the assay to include numerous relevant canine cell types, such as DH82 monocytes, chondrocytes, and synovial fibroblasts. Specifically, the same select sgRNAs were used with AR-Cas9 in DH82 monocytes, where a strong preference for each desired edit was again observed (FIG. 96A). Similar editing efficacies were also observed in chondrocytes (FIG. 96B) and synovial fibroblasts (FIG. 17C). This result demonstrated that consistently high editing efficacies and precision for a given sgRNA and high-fidelity RNA-dependent nuclease pairing was achieved across various cell types.

### Example 6: Editing in Human Cells

[1045] Having designed and validated numerous guides for multiple mammalian species (see FIGS. 1-89) and confirming the editing efficacy of these guides in canine cells, the next was to begin screening human-directed guides for their in vitro editing efficacy. As part of this testing, around 10,000 to 500,000 HEK cells were electroporated as described in detail above to introduce wild-type SpCas9 (WT-Cas9) paired with various synthetic sgRNA targeting human IL1RAP (hIL1RAP). Subsequent Sanger sequencing of the edited hIL1RAP gene, as previously described above, followed after two to three days of cell culture.

[1046] The inference of CRISPR edits from Sanger traces showed that multiple hIL1RAP sgRNAs caused about 50% or higher frameshifts. The top performer was sgRNA OHP06 showing >95% frameshift and high precision (i.e. only edit was detected). The results in this Example showed that multiple human guide RNAs were able to edit a targeted gene, thereby providing further support for the bioinformatic approach to guide RNA selection described herein.

### Example 7: Editing in Primary Human Disc Cells

[1047] Following the identification of numerous human guides with strong editing efficacy, next steps included observing editing in cell types relevant to intradiscal administration. As part of this testing, sgRNA OHP06 was selected from the initial screen described in Example 6 and paired with wild-type SpCas9 protein (WT-Cas9). These materials were electroporated into nucleus pulposus (primary disc) cells as described above, and after two days, the primary disc cells were then genotyped as previously described.

[1048] Sanger sequencing traces showed that the CRISPR-mediated frameshift occurred with 94% efficacy (R²>0.90) and that most detected edits (93%) being one single T duplication (FIG. 98A). Further interrogation of the edited cells found that the position of the sgRNA binding in exon 8 of human IL1RAP (hIL1RAP), which encodes Ig-like C2-type domain 3 (FIG. 98B, upper panel) carried the duplicated T as compared to control nucleus pulposus cells (FIG. 98B, lower panel). Finally, AlphaFold2-predictions of the 3D structures of wild-type and CRISPR-edited IL1RAP were rendered (FIG. 98C). The T duplication caused a frameshift at amino acid position 266 converting Cysteine (Cys) into Leucine (Leu) and prematurely terminating translation at codon position 6 as counted from the first changed amino acid to the premature stop codon (Cys266Leufs*6). As a result, the CRISPR-edited hIL1RAP lacks the last of three Ig-like C2-type domains as well as the transmembrane and TIR domains.

[1049] These results provided further support for the bioinformatic approach used in selecting guide RNA sequences. Moreover, they showed that at least one gene, IL1RAP, could be uniformly and efficaciously edited in human intervertebral disc cells by the methods herein disclosed. Finally, the results demonstrate that the editing has the desired effect (i.e., modifying the expression of an encoded human gene product). Taken together, the results in this Example provide a mechanism for use of CRISPR to edit cells of the human spine.

[1050] The examples set forth above are provided to give those of ordinary skill in the art a complete disclosure and description of how to make and use the embodiments of the compositions, systems and methods of the disclosure, and are not intended to limit the scope of what the inventors regard as their invention. Modifications of the above-described modes for carrying out the embodiments of the disclosure that are obvious to persons of skill in the art are intended to be within the scope of the following claims. All patents and publications mentioned in the specification are indicative of the levels of skill of those skilled in the art to which the disclosure pertains.

[1051] All headings and section designations are used for clarity and reference purposes only and are not to be considered limiting in any way. For example, those of skill in the art will appreciate the usefulness of combining various aspects from different headings and sections as appropriate according to the spirit and scope of the disclosure described herein.

[1052] It is to be understood that the methods described herein are not limited to the particular methodology, protocols, subjects, and sequencing techniques described herein and as such can vary. It is also to be understood that the terminology used herein is for the purpose of describing particular embodiments only, and is not intended to limit the scope of the methods and compositions described herein, which will be limited only by the appended claims. While some embodiments of the present disclosure have been shown and described herein, it will be obvious to those skilled in the art that such embodiments are provided by way of example only. Numerous variations, changes, and substitutions will now occur to those skilled in the art without departing from the disclosure. It should be understood that various alternatives to the embodiments of the disclosure described herein can be employed in practicing the disclosure. It is intended that the following claims define the scope of the disclosure and that methods and structures within the scope of these claims and their equivalents be covered thereby.

[1053] The examples set forth above are provided to give those of ordinary skill in the art a complete disclosure and description of how to make and use the embodiments of the compositions, systems and methods of the disclosure, and are not intended to limit the scope of what the inventors regard as their invention. Modifications of the above-described modes for carrying out the embodiments of the disclosure that are obvious to persons of skill in the art are intended to be within the scope of the following claims. All patents and publications mentioned in the specification are indicative of the levels of skill of those skilled in the art to which the disclosure pertains.

[1054] All headings and section designations are used for clarity and reference purposes only and are not to be considered limiting in any way. For example, those of skill in the art will appreciate the usefulness of combining various aspects from different headings and sections as appropriate according to the spirit and scope of the disclosure described herein.

[1055] It is to be understood that the methods described herein are not limited to the particular methodology, protocols, subjects, and sequencing techniques described herein and as such can vary. It is also to be understood that the terminology used herein is for the purpose of describing particular embodiments only, and is not intended to limit the scope of the methods and compositions described herein, which will be limited only by the appended claims. While some embodiments of the present disclosure have been shown and described herein, it will be obvious to those skilled in the art that such embodiments are provided by way of example only. Numerous variations, changes, and substitutions will now occur to those skilled in the art without departing from the disclosure. It should be understood that various alternatives to the embodiments of the disclosure described herein can be employed in practicing the disclosure. It is intended that the following claims define the scope of the disclosure and that methods and structures within the scope of these claims and their equivalents be covered thereby.

[1056] Several aspects are described with reference to example applications for illustration. Unless otherwise indicated, any embodiment can be combined with any other embodiment. It should be understood that numerous specific details, relationships, and methods are set forth to provide a full understanding of the features described herein. A skilled artisan, however, will readily recognize that the features described herein can be practiced without one or more of the specific details or with other methods. The features described herein are not limited by the illustrated ordering of acts or events, as some acts can occur in different orders and/or concurrently with other acts or events. Furthermore, not all illustrated acts or events are required to implement a methodology in accordance with the features described herein.

[1057] While some embodiments have been shown and described herein, it will be obvious to those skilled in the art that such embodiments are provided by way of example only. It is not intended that the disclosure be limited by the specific examples provided within the specification. While the disclosure has been described with reference to the aforementioned specification, the descriptions and illustrations of the embodiments herein are not meant to be construed in a limiting sense. Numerous variations, changes, and substitutions will now occur to those skilled in the art without departing from the disclosure.

[1058] Furthermore, it shall be understood that all aspects of the disclosure are not limited to the specific depictions, configurations or relative proportions set forth herein which depend upon a variety of conditions and variables. It should be understood that various alternatives to the embodiments of the disclosure described herein can be employed in practicing the disclosure. It is therefore contemplated that the disclosure shall also cover any such alternatives, modifications, variations or equivalents. It is intended that the following claims define the scope of the disclosure and that methods and structures within the scope of these claims and their equivalents be covered thereby.

[1059] All publications, patents, and patent applications herein are incorporated by reference to the same extent as if each individual publication, patent, or patent application was specifically and individually indicated to be incorporated by reference. In the event of a conflict between a term herein and a term in an incorporated reference, the term herein controls.

What is claimed is:

1. A pharmaceutical composition for treating a spinal disorder in a mammalian subject in need thereof, the composition comprising:
(i) an RNA-guided nuclease or a nucleic acid encoding an RNA-guided nuclease; and
(ii) at least one guide RNA or a nucleic acid encoding at least one guide RNA targeting a gene selected from the group consisting of FGF2, FGFR1, CCN2, ADAMTS1, ADAMTS5, MMP1, MMP2, MMP3, MMP7, MMP8, MMP10, MMP12, MMP13, TIMP1, TIMP3, CXCL1, CXCL2, CXCL3, CXCL5, CXCL6, CXCL8, CCL2, CCL3, CCL5, CCL7, CCL20, CXCR2, CCR7, YAP1, TNF, ADAM17, TNFRSF1A, TNFRSF1B, IL4, IL1R1, IL6, IL6R, CXCR1, IL10, IL10RB, IL10RA, IL13, IL13RA1, IL13RA2, IL17A, IL17RA, IL18, IL18RAP, IL18R1, SCN1A, SCN2A, SCN3A, SCN4A, SCN5A, SCN8A, SCN9A, SCN10A, SCN11A, TAC1, TACR1, MRGPRX2, ATP1A1, TACR2, TAC3, TACR3, CALCA, CALCB, RAMP1, CALCRL, ADM, CRCP, NGF, NGFR, NTRK1, NTF3, NTF4, NTRK2, IL1RAP, IL1α gene, IL1β and BDNF.

2. The pharmaceutical composition of claim 1, wherein the spinal disorder is intervertebral disc degeneration.

3. The pharmaceutical composition of claim 1, wherein the spinal disorder is disc herniation.

4. The pharmaceutical composition of claim 1, wherein the spinal disorder is spinal stenosis.

5. The pharmaceutical composition of claim 1, wherein the spinal disorder is spondylosis.

6. The pharmaceutical composition of claim 1, wherein the spinal disorder is spondylolisthesis.

7. The pharmaceutical composition of claim 1, wherein the spinal disorder is a spinal infection.

8. The pharmaceutical composition of claim 7, wherein the spinal infection is discospondylitis.

9. The pharmaceutical composition of claim 1, wherein the spinal disorder is a spinal neuropathy.

10. The pharmaceutical composition of claim 9, wherein the spinal neuropathy is discogenic pain, radiculopathy, sciatica, or post-herpetic neuralgia.

11. The pharmaceutical composition of any one of claims 1-10, wherein the pharmaceutical composition is for treating low back pain or neck pain associated with the spinal disorder.

12. The pharmaceutical composition of any one of claims 1-11, wherein the at least one guide RNA or a nucleic acid encoding at least one guide RNA targets a mammalian FGF2 gene.

13. The pharmaceutical composition of claim 12, wherein the mammalian FGF2 gene is a human FGF2 gene.

14. The pharmaceutical composition of claim 13, wherein the at least one guide RNA comprises a crRNA sequence selected from the group consisting of those sequences shown in FIG. 26 (SEQ ID NOs: 673-720).

15. The pharmaceutical composition of claim 13, wherein the at least one guide RNA comprises a crRNA sequence selected from the group consisting of SEQ ID NOs: 673-682.

16. The pharmaceutical composition of any one of claims 1-11, wherein the at least one guide RNA or a nucleic acid encoding at least one guide RNA targets a mammalian FGFR1 gene.

17. The pharmaceutical composition of claim 16, wherein the mammalian FGFR1 gene is a human FGFR1 gene.

18. The pharmaceutical composition of claim 17, wherein the at least one guide RNA comprises a crRNA sequence selected from the group consisting of those sequences shown in FIG. 27 (SEQ ID NOs: 721-768).

19. The pharmaceutical composition of claim 17, wherein the at least one guide RNA comprises a crRNA sequence selected from the group consisting of SEQ ID NOs: 721-730.

20. The pharmaceutical composition of any one of claims 1-11, wherein the at least one guide RNA or a nucleic acid encoding at least one guide RNA targets a mammalian CCN2 gene.

21. The pharmaceutical composition of claim 20, wherein the mammalian CCN2 gene is a human CCN2 gene.

22. The pharmaceutical composition of claim 21, wherein the at least one guide RNA comprises a crRNA sequence selected from the group consisting of those sequences shown in FIG. 15 (SEQ ID NOs: 426-473).

23. The pharmaceutical composition of claim 21, wherein the at least one guide RNA comprises a crRNA sequence selected from the group consisting of SEQ ID NOs: 426-435.

24. The pharmaceutical composition of any one of claims 1-11, wherein the at least one guide RNA or a nucleic acid encoding at least one guide RNA targets a mammalian ADAMTS1 gene.

25. The pharmaceutical composition of claim 24, wherein the mammalian ADAMTS1 gene is a human ADAMTS1 gene.

26. The pharmaceutical composition of claim 25, wherein the at least one guide RNA comprises a crRNA sequence selected from the group consisting of those sequences shown in FIG. 2 (SEQ ID NOs: 49-96).

27. The pharmaceutical composition of claim 25, wherein the at least one guide RNA comprises a crRNA sequence selected from the group consisting of SEQ ID NOs:49-58.

28. The pharmaceutical composition of any one of claims 1-11, wherein the at least one guide RNA or a nucleic acid encoding at least one guide RNA targets a mammalian ADAMTS5 gene.

29. The pharmaceutical composition of claim 28, wherein the mammalian ADAMTS5 gene is a human ADAMTS5 gene.

30. The pharmaceutical composition of claim 29, wherein the at least one guide RNA comprises a crRNA sequence selected from the group consisting of those sequences shown in FIG. 3 (SEQ ID NOs: 97-144).

31. The pharmaceutical composition of claim 29, wherein the at least one guide RNA comprises a crRNA sequence selected from the group consisting of SEQ ID NOs:97-106.

32. The pharmaceutical composition of any one of claims 1-11, wherein the at least one guide RNA or a nucleic acid encoding at least one guide RNA targets a mammalian MMP1 gene.

33. The pharmaceutical composition of claim 32, wherein the mammalian MMP1 gene is a human MMP1 gene.

34. The pharmaceutical composition of claim 33, wherein the at least one guide RNA comprises a crRNA sequence selected from the group consisting of those sequences shown in FIG. 47 (SEQ ID NOs: 1311-1343).

35. The pharmaceutical composition of claim 33, wherein the at least one guide RNA comprises a crRNA sequence selected from the group consisting of SEQ ID NOs: 1311-1320.

36. The pharmaceutical composition of any one of claims 1-11, wherein the at least one guide RNA or a nucleic acid encoding at least one guide RNA targets a mammalian MMP2 gene.

37. The pharmaceutical composition of claim 36, wherein the mammalian MMP2 gene is a human MMP2 gene.

38. The pharmaceutical composition of claim 37, wherein the at least one guide RNA comprises a crRNA sequence selected from the group consisting of those sequences shown in FIG. 48 (SEQ ID NOs: 1344-1391).

39. The pharmaceutical composition of claim 37, wherein the at least one guide RNA comprises a crRNA sequence selected from the group consisting of SEQ ID NOs: 1615-1624.

40. The pharmaceutical composition of any one of claims 1-11, wherein the at least one guide RNA or a nucleic acid encoding at least one guide RNA targets a mammalian MMP3 gene.

41. The pharmaceutical composition of claim 40, wherein the mammalian MMP3 gene is a human MMP3 gene.

42. The pharmaceutical composition of claim 41, wherein the at least one guide RNA comprises a crRNA sequence selected from the group consisting of those sequences shown in FIG. 49 (SEQ ID NOs: 1392-1417).

43. The pharmaceutical composition of claim 41, wherein the at least one guide RNA comprises a crRNA sequence selected from the group consisting of SEQ ID NOs: 1392-1401.

44. The pharmaceutical composition of any one of claims 1-11, wherein the at least one guide RNA or a nucleic acid encoding at least one guide RNA targets a mammalian MMP7 gene.

45. The pharmaceutical composition of claim 44, wherein the mammalian MMP7 gene is a human MMP7 gene.

46. The pharmaceutical composition of claim 45, wherein the at least one guide RNA comprises a crRNA sequence selected from the group consisting of those sequences shown in FIG. 50 (SEQ ID NOs: 1418-1436).

47. The pharmaceutical composition of claim 45, wherein the at least one guide RNA comprises a crRNA sequence selected from the group consisting of SEQ ID NOs: 1418-1427.

48. The pharmaceutical composition of any one of claims 1-11, wherein the at least one guide RNA or a nucleic acid encoding at least one guide RNA targets a mammalian MMP8 gene.

49. The pharmaceutical composition of claim 48, wherein the mammalian MMP8 gene is a human MMP8 gene.

50. The pharmaceutical composition of claim 49, wherein the at least one guide RNA comprises a crRNA sequence selected from the group consisting of those sequences shown in FIG. 51 (SEQ ID NOs: 1437-1474).

51. The pharmaceutical composition of claim 49, wherein the at least one guide RNA comprises a crRNA sequence selected from the group consisting of SEQ ID NOs: 1437-1446.

52. The pharmaceutical composition of any one of claims 1-11, wherein the at least one guide RNA or a nucleic acid encoding at least one guide RNA targets a mammalian MMP10 gene.

53. The pharmaceutical composition of claim 52, wherein the mammalian MMP10 gene is a human MMP10 gene.

54. The pharmaceutical composition of claim 53, wherein the at least one guide RNA comprises a crRNA sequence selected from the group consisting of those sequences shown in FIG. 52 (SEQ ID NOs: 1475-1497).

55. The pharmaceutical composition of claim 53, wherein the at least one guide RNA comprises a crRNA sequence selected from the group consisting of SEQ ID NOs: 1475-1484.

56. The pharmaceutical composition of any one of claims 1-11, wherein the at least one guide RNA or a nucleic acid encoding at least one guide RNA targets a mammalian MMP12 gene.

57. The pharmaceutical composition of claim 56, wherein the mammalian MMP12 gene is a human MMP12 gene.

58. The pharmaceutical composition of claim 57, wherein the at least one guide RNA comprises a crRNA sequence selected from the group consisting of those sequences shown in FIG. 53 (SEQ ID NOs: 1498-1541).

59. The pharmaceutical composition of claim 57, wherein the at least one guide RNA comprises a crRNA sequence selected from the group consisting of SEQ ID NOs: 1498-1507.

60. The pharmaceutical composition of any one of claims 1-11, wherein the at least one guide RNA or a nucleic acid encoding at least one guide RNA targets a mammalian MMP13 gene.

61. The pharmaceutical composition of claim 60, wherein the mammalian MMP13 gene is a human MMP13 gene.

62. The pharmaceutical composition of claim 61, wherein the at least one guide RNA comprises a crRNA sequence selected from the group consisting of those sequences shown in FIG. 54 (SEQ ID NOs: 1542-1568).

63. The pharmaceutical composition of claim 61, wherein the at least one guide RNA comprises a crRNA sequence selected from the group consisting of SEQ ID NOs: 1542-1551.

64. The pharmaceutical composition of any one of claims 1-11, wherein the at least one guide RNA or a nucleic acid encoding at least one guide RNA targets a mammalian TIMP1 gene.

65. The pharmaceutical composition of claim 64, wherein the mammalian TIMP1 gene is a human TIMP1 gene.

66. The pharmaceutical composition of claim 65, wherein the at least one guide RNA comprises a crRNA sequence selected from the group consisting of those sequences shown in FIG. 77 (SEQ ID NOs: 2470-2509).

67. The pharmaceutical composition of claim 65, wherein the at least one guide RNA comprises a crRNA sequence selected from the group consisting of SEQ ID NOs: 2470-2479.

68. The pharmaceutical composition of any one of claims 1-11, wherein the at least one guide RNA or a nucleic acid encoding at least one guide RNA targets a mammalian TIMP3 gene.

69. The pharmaceutical composition of claim 68, wherein the mammalian TIMP3 gene is a human TIMP3 gene.

70. The pharmaceutical composition of claim 69, wherein the at least one guide RNA comprises a crRNA sequence selected from the group consisting of those sequences shown in FIG. 78 (SEQ ID NOs: 2510-2557).

71. The pharmaceutical composition of claim 69, wherein the at least one guide RNA comprises a crRNA sequence selected from the group consisting of SEQ ID NOs: 2510-2519.

72. The pharmaceutical composition of any one of claims 1-11, wherein the at least one guide RNA or a nucleic acid encoding at least one guide RNA targets a mammalian CXCL1 gene.

73. The pharmaceutical composition of claim 72, wherein the mammalian CXCL1 gene is a human CXCL1 gene.

74. The pharmaceutical composition of claim 73, wherein the at least one guide RNA comprises a crRNA sequence selected from the group consisting of those sequences shown in FIG. 18 (SEQ ID NOs: 535-551).

75. The pharmaceutical composition of claim 73, wherein the at least one guide RNA comprises a crRNA sequence selected from the group consisting of SEQ ID NOs: 535-544.

76. The pharmaceutical composition of any one of claims 1-11, wherein the at least one guide RNA or a nucleic acid encoding at least one guide RNA targets a mammalian CXCL2 gene.

77. The pharmaceutical composition of claim 76, wherein the mammalian CXCL2 gene is a human CXCL2 gene.

78. The pharmaceutical composition of claim 77, wherein the at least one guide RNA comprises a crRNA sequence selected from the group consisting of those sequences shown in FIG. 19 (SEQ ID NOs: 552-568).

79. The pharmaceutical composition of claim 77, wherein the at least one guide RNA comprises a crRNA sequence selected from the group consisting of SEQ ID NOs: 552-561.

80. The pharmaceutical composition of any one of claims 1-11, wherein the at least one guide RNA or a nucleic acid encoding at least one guide RNA targets a mammalian CXCL3 gene.

81. The pharmaceutical composition of claim 80, wherein the mammalian CXCL3 gene is a human CXCL3 gene.

82. The pharmaceutical composition of claim 81, wherein the at least one guide RNA comprises a crRNA sequence selected from the group consisting of those sequences shown in FIG. 20 (SEQ ID NOs: 569-585).

83. The pharmaceutical composition of claim 81, wherein the at least one guide RNA comprises a crRNA sequence selected from the group consisting of SEQ ID NOs: 569-578.

84. The pharmaceutical composition of any one of claims 1-11, wherein the at least one guide RNA or a nucleic acid encoding at least one guide RNA targets a mammalian CXCL5 gene.

85. The pharmaceutical composition of claim 84, wherein the mammalian CXCL5 gene is a human CXCL5 gene.

86. The pharmaceutical composition of claim 85, wherein the at least one guide RNA comprises a crRNA sequence selected from the group consisting of those sequences shown in FIG. 21 (SEQ ID NOs: 586-602).

87. The pharmaceutical composition of claim 85, wherein the at least one guide RNA comprises a crRNA sequence selected from the group consisting of SEQ ID NOs: 586-595.

88. The pharmaceutical composition of any one of claims 1-11, wherein the at least one guide RNA or a nucleic acid encoding at least one guide RNA targets a mammalian CXCL6 gene.

89. The pharmaceutical composition of claim 88, wherein the mammalian CXCL6 gene is a human CXCL6 gene.

90. The pharmaceutical composition of claim 89, wherein the at least one guide RNA comprises a crRNA sequence selected from the group consisting of those sequences shown in FIG. 22 (SEQ ID NOs: 603-619).

91. The pharmaceutical composition of claim 89, wherein the at least one guide RNA comprises a crRNA sequence selected from the group consisting of SEQ ID NOs: 603-612.

92. The pharmaceutical composition of any one of claims 1-11, wherein the at least one guide RNA or a nucleic acid encoding at least one guide RNA targets a mammalian CXCL8 gene.

93. The pharmaceutical composition of claim 92, wherein the mammalian CXCL8 gene is a human CXCL8 gene.

94. The pharmaceutical composition of claim 93, wherein the at least one guide RNA comprises a crRNA sequence selected from the group consisting of those sequences shown in FIG. 23 (SEQ ID NOs: 620-636).

95. The pharmaceutical composition of claim 93, wherein the at least one guide RNA comprises a crRNA sequence selected from the group consisting of SEQ ID NOs: 620-629.

96. The pharmaceutical composition of any one of claims 1-11, wherein the at least one guide RNA or a nucleic acid encoding at least one guide RNA targets a mammalian CCL2 gene.

97. The pharmaceutical composition of claim 96, wherein the mammalian CCL2 gene is a human CCL2 gene.

98. The pharmaceutical composition of claim 97, wherein the at least one guide RNA comprises a crRNA sequence selected from the group consisting of those sequences shown in FIG. 10 (SEQ ID NOs: 341-357).

99. The pharmaceutical composition of claim 97, wherein the at least one guide RNA comprises a crRNA sequence selected from the group consisting of SEQ ID NOs: 341-350.

100. The pharmaceutical composition of any one of claims 1-11, wherein the at least one guide RNA or a nucleic acid encoding at least one guide RNA targets a mammalian CCL3 gene.

101. The pharmaceutical composition of claim 100, wherein the mammalian CCL3 gene is a human CCL3 gene.

102. The pharmaceutical composition of claim 101, wherein the at least one guide RNA comprises a crRNA sequence selected from the group consisting of those sequences shown in FIG. 11 (SEQ ID NOs: 358-374).

103. The pharmaceutical composition of claim 101, wherein the at least one guide RNA comprises a crRNA sequence selected from the group consisting of SEQ ID NOs: 358-367.

104. The pharmaceutical composition of any one of claims 1-11, wherein the at least one guide RNA or a nucleic acid encoding at least one guide RNA targets a mammalian CCL5 gene.

105. The pharmaceutical composition of claim 104, wherein the mammalian CCL5 gene is a human CCL5 gene.

106. The pharmaceutical composition of claim 105, wherein the at least one guide RNA comprises a crRNA sequence selected from the group consisting of those sequences shown in FIG. 12 (SEQ ID NOs: 375-391).

107. The pharmaceutical composition of claim 105, wherein the at least one guide RNA comprises a crRNA sequence selected from the group consisting of SEQ ID NOs: 375-384.

108. The pharmaceutical composition of any one of claims 1-11, wherein the at least one guide RNA or a nucleic acid encoding at least one guide RNA targets a mammalian CCL7 gene.

109. The pharmaceutical composition of claim 108, wherein the mammalian CCL7 gene is a human CCL7 gene.

110. The pharmaceutical composition of claim 109, wherein the at least one guide RNA comprises a crRNA sequence selected from the group consisting of those sequences shown in FIG. 13 (SEQ ID NOs: 392-408).

111. The pharmaceutical composition of claim 109, wherein the at least one guide RNA comprises a crRNA sequence selected from the group consisting of SEQ ID NOs: 392-401.

112. The pharmaceutical composition of any one of claims 1-11, wherein the at least one guide RNA or a nucleic acid encoding at least one guide RNA targets a mammalian CCL20 gene.

113. The pharmaceutical composition of claim 112, wherein the mammalian CCL20 gene is a human CCL20 gene.

114. The pharmaceutical composition of claim 113, wherein the at least one guide RNA comprises a crRNA sequence selected from the group consisting of those sequences shown in FIG. 14 (SEQ ID NOs: 409-425).

115. The pharmaceutical composition of claim 113, wherein the at least one guide RNA comprises a crRNA sequence selected from the group consisting of SEQ ID NOs: 409-418.

116. The pharmaceutical composition of any one of claims 1-11, wherein the at least one guide RNA or a nucleic acid encoding at least one guide RNA targets a mammalian CXCR2 gene.

117. The pharmaceutical composition of claim 116, wherein the mammalian CXCR2 gene is a human CXCR2 gene.

118. The pharmaceutical composition of claim 117, wherein the at least one guide RNA comprises a crRNA sequence selected from the group consisting of those sequences shown in FIG. 25 (SEQ ID NOs: 656-672).

119. The pharmaceutical composition of claim 117, wherein the at least one guide RNA comprises a crRNA sequence selected from the group consisting of SEQ ID NOs: 656-665.

120. The pharmaceutical composition of any one of claims 1-11, wherein the at least one guide RNA or a nucleic acid encoding at least one guide RNA targets a mammalian CCR7 gene.

121. The pharmaceutical composition of claim 120, wherein the mammalian CCR7 gene is a human CCR7 gene.

122. The pharmaceutical composition of claim 121, wherein the at least one guide RNA comprises a crRNA sequence selected from the group consisting of those sequences shown in FIG. 16 (SEQ ID NOs: 474-517).

123. The pharmaceutical composition of claim 121, wherein the at least one guide RNA comprises a crRNA sequence selected from the group consisting of SEQ ID NOs: 474-483.

124. The pharmaceutical composition of any one of claims 1-11, wherein the at least one guide RNA or a nucleic acid encoding at least one guide RNA targets a mammalian YAP1 gene.

125. The pharmaceutical composition of claim 124, wherein the mammalian YAP1 gene is a human YAP1 gene.

126. The pharmaceutical composition of claim 125, wherein the at least one guide RNA comprises a crRNA sequence selected from the group consisting of those sequences shown in FIG. 82 (SEQ ID NOs: 2671-2718).

127. The pharmaceutical composition of claim 125, wherein the at least one guide RNA comprises a crRNA sequence selected from the group consisting of SEQ ID NOS: 2671-2680.

128. The pharmaceutical composition of any one of claims 1-11, wherein the at least one guide RNA or a nucleic acid encoding at least one guide RNA targets a mammalian TNF gene.

129. The pharmaceutical composition of claim 128, wherein the mammalian TNF gene is a human TNF gene.

130. The pharmaceutical composition of claim 129, wherein the at least one guide RNA comprises a crRNA sequence selected from the group consisting of those sequences shown in FIG. 79 (SEQ ID NOs: 2558-2574).

131. The pharmaceutical composition of claim 129, wherein the at least one guide RNA comprises a crRNA sequence selected from the group consisting of SEQ ID NOs: 2558-2567.

132. The pharmaceutical composition of any one of claims 1-11, wherein the at least one guide RNA or a nucleic acid encoding at least one guide RNA targets a mammalian ADAM17 gene.

133. The pharmaceutical composition of claim 132, wherein the mammalian ADAM17 gene is a human ADAM17 gene.

134. The pharmaceutical composition of claim 133, wherein the at least one guide RNA comprises a crRNA sequence selected from the group consisting of those sequences shown in FIG. 1 (SEQ ID NOS:1-48).

135. The pharmaceutical composition of claim 133, wherein the at least one guide RNA comprises a crRNA sequence selected from the group consisting of SEQ ID NOS:1-10.

136. The pharmaceutical composition of any one of claims 1-11, wherein the at least one guide RNA or a nucleic acid encoding at least one guide RNA targets a mammalian TNFRSF1A gene.

137. The pharmaceutical composition of claim 136, wherein the mammalian TNFRSF1A gene is a human TNFRSF1A gene.

138. The pharmaceutical composition of claim 137, wherein the at least one guide RNA comprises a crRNA sequence selected from the group consisting of those sequences shown in FIG. 80 (SEQ ID NOS: 2575-2622).

139. The pharmaceutical composition of claim 137, wherein the at least one guide RNA comprises a crRNA sequence selected from the group consisting of SEQ ID NOS: 2575-2584.

140. The pharmaceutical composition of any one of claims 1-11, wherein the at least one guide RNA or a nucleic acid encoding at least one guide RNA targets a mammalian TNFRSF1B gene.

141. The pharmaceutical composition of claim 140, wherein the mammalian TNFRSF1B gene is a human TNFRSF1B gene.

142. The pharmaceutical composition of claim 141, wherein the at least one guide RNA comprises a crRNA sequence selected from the group consisting of those sequences shown in FIG. 81 (SEQ ID NOS: 2623-2670).

143. The pharmaceutical composition of claim 141, wherein the at least one guide RNA comprises a crRNA sequence selected from the group consisting of SEQ ID NOS: 2623-2632.

144. The pharmaceutical composition of any one of claims 1-11, wherein the at least one guide RNA or a nucleic acid encoding at least one guide RNA targets a mammalian IL4 gene.

145. The pharmaceutical composition of claim 144, wherein the mammalian IL4 gene is a human IL4 gene.

146. The pharmaceutical composition of claim 145, wherein the at least one guide RNA comprises a crRNA sequence selected from the group consisting of those sequences shown in FIG. 32 (SEQ ID NOS: 888-911).

147. The pharmaceutical composition of claim 145, wherein the at least one guide RNA comprises a crRNA sequence selected from the group consisting of SEQ ID NOS: 888-897.

148. The pharmaceutical composition of any one of claims 1-11, wherein the at least one guide RNA or a nucleic acid encoding at least one guide RNA targets a mammalian IL1R1 gene.

149. The pharmaceutical composition of claim 148, wherein the mammalian IL1R1 gene is a human IL1R1 gene.

150. The pharmaceutical composition of claim 149, wherein the at least one guide RNA comprises a crRNA sequence selected from the group consisting of those sequences shown in FIG. 30 (SEQ ID NOS: 806-839).

151. The pharmaceutical composition of claim 149, wherein the at least one guide RNA comprises a crRNA sequence selected from the group consisting of SEQ ID NOS: 806-815.

152. The pharmaceutical composition of any one of claims 1-11, wherein the at least one guide RNA or a nucleic acid encoding at least one guide RNA targets a mammalian IL6 gene.

153. The pharmaceutical composition of claim 152, wherein the mammalian IL6 gene is a human IL6 gene.

154. The pharmaceutical composition of claim 153, wherein the at least one guide RNA comprises a crRNA sequence selected from the group consisting of those sequences shown in FIG. 33 (SEQ ID NOS: 912-928).

155. The pharmaceutical composition of claim 153, wherein the at least one guide RNA comprises a crRNA sequence selected from the group consisting of SEQ ID NOS: 912-921.

156. The pharmaceutical composition of any one of claims 1-11, wherein the at least one guide RNA or a nucleic acid encoding at least one guide RNA targets a mammalian IL6R gene.

157. The pharmaceutical composition of claim 156, wherein the mammalian IL6R gene is a human IL6R gene.

158. The pharmaceutical composition of claim 157, wherein the at least one guide RNA comprises a crRNA sequence selected from the group consisting of those sequences shown in FIG. 34 (SEQ ID NOS: 929-963).

159. The pharmaceutical composition of claim 157, wherein the at least one guide RNA comprises a crRNA sequence selected from the group consisting of SEQ ID NOS: 929-938.

160. The pharmaceutical composition of any one of claims 1-11, wherein the at least one guide RNA or a nucleic acid encoding at least one guide RNA targets a mammalian CXCR1 gene.

161. The pharmaceutical composition of claim 160, wherein the mammalian CXCR1 gene is a human CXCR1 gene.

162. The pharmaceutical composition of claim 161, wherein the at least one guide RNA comprises a crRNA sequence selected from the group consisting of those sequences shown in FIG. 24 (SEQ ID NOS: 637-655).

163. The pharmaceutical composition of claim 161, wherein the at least one guide RNA comprises a crRNA sequence selected from the group consisting of SEQ ID NOS: 637-646.

164. The pharmaceutical composition of any one of claims 1-11, wherein the at least one guide RNA or a nucleic acid encoding at least one guide RNA targets a mammalian IL10 gene.

165. The pharmaceutical composition of claim 164, wherein the mammalian IL10 gene is a human IL10 gene.

166. The pharmaceutical composition of claim 165, wherein the at least one guide RNA comprises a crRNA sequence selected from the group consisting of those sequences shown in FIG. 36 (SEQ ID NOS: 964-990).

167. The pharmaceutical composition of claim 165, wherein the at least one guide RNA comprises a crRNA sequence selected from the group consisting of SEQ ID NOS: 964-973.

168. The pharmaceutical composition of any one of claims 1-11, wherein the at least one guide RNA or a nucleic acid encoding at least one guide RNA targets a mammalian IL10RB gene.

169. The pharmaceutical composition of claim 168, wherein the mammalian IL10RB gene is a human IL10RB gene.

170. The pharmaceutical composition of claim 169, wherein the at least one guide RNA comprises a crRNA sequence selected from the group consisting of those sequences shown in FIG. 38 (SEQ ID NOS: 1056-1082).

171. The pharmaceutical composition of claim 169, wherein the at least one guide RNA comprises a crRNA sequence selected from the group consisting of SEQ ID NOS: 1056-1064.

172. The pharmaceutical composition of any one of claims 1-11, wherein the at least one guide RNA or a nucleic acid encoding at least one guide RNA targets a mammalian IL10RA gene.

173. The pharmaceutical composition of claim 172, wherein the mammalian IL10RA gene is a human IL10RA gene.

174. The pharmaceutical composition of claim 173, wherein the at least one guide RNA comprises a crRNA sequence selected from the group consisting of those sequences shown in FIG. 37 (SEQ ID NOS: 1008-1055).

175. The pharmaceutical composition of claim 173, wherein the at least one guide RNA comprises a crRNA sequence selected from the group consisting of SEQ ID NOS: 1008-1017.

176. The pharmaceutical composition of any one of claims 1-11, wherein the at least one guide RNA or a nucleic acid encoding at least one guide RNA targets a mammalian IL13 gene.

177. The pharmaceutical composition of claim 176, wherein the mammalian IL13 gene is a human IL13 gene.

178. The pharmaceutical composition of claim 177, wherein the at least one guide RNA comprises a crRNA sequence selected from the group consisting of those sequences shown in FIG. 39 (SEQ ID NOS: 1083-1104).

179. The pharmaceutical composition of claim 177, wherein the at least one guide RNA comprises a crRNA sequence selected from the group consisting of SEQ ID NOS: 1083-1104.

180. The pharmaceutical composition of any one of claims 1-11, wherein the at least one guide RNA or a nucleic acid encoding at least one guide RNA targets a mammalian IL13RA1 gene.

181. The pharmaceutical composition of claim 180, wherein the mammalian IL13RA1 gene is a human IL13RA1 gene.

182. The pharmaceutical composition of claim 181, wherein the at least one guide RNA comprises a crRNA sequence selected from the group consisting of those sequences shown in FIG. 40 (SEQ ID NOS: 1105-1130).

183. The pharmaceutical composition of claim 181, wherein the at least one guide RNA comprises a crRNA sequence selected from the group consisting of SEQ ID NOS: 1105-1114.

184. The pharmaceutical composition of any one of claims 1-11, wherein the at least one guide RNA or a nucleic acid encoding at least one guide RNA targets a mammalian IL13RA2 gene.

185. The pharmaceutical composition of claim 184, wherein the mammalian IL13RA2 gene is a human IL13RA2 gene.

186. The pharmaceutical composition of claim 185, wherein the at least one guide RNA comprises a crRNA sequence selected from the group consisting of those sequences shown in FIG. 41 (SEQ ID NOS: 1131-1147).

187. The pharmaceutical composition of claim 185, wherein the at least one guide RNA comprises a crRNA sequence selected from the group consisting of SEQ ID NOS: 1131-1140.

188. The pharmaceutical composition of any one of claims 1-11, wherein the at least one guide RNA or a nucleic acid encoding at least one guide RNA targets a mammalian IL17A gene.

189. The pharmaceutical composition of claim 188, wherein the mammalian IL17A gene is a human IL17A gene.

190. The pharmaceutical composition of claim 189, wherein the at least one guide RNA comprises a crRNA sequence selected from the group consisting of those sequences shown in FIG. 42 (1148-1173).

191. The pharmaceutical composition of claim 189, wherein the at least one guide RNA comprises a crRNA sequence selected from the group consisting of SEQ ID NOS: 1148-1157.

192. The pharmaceutical composition of any one of claims 1-11, wherein the at least one guide RNA or a nucleic acid encoding at least one guide RNA targets a mammalian IL17RA gene.

193. The pharmaceutical composition of claim 192, wherein the mammalian IL17RA gene is a human IL17RA gene.

194. The pharmaceutical composition of claim 193, wherein the at least one guide RNA comprises a crRNA sequence selected from the group consisting of those sequences shown in FIG. 43 (1174-1221).

195. The pharmaceutical composition of claim 193, wherein the at least one guide RNA comprises a crRNA sequence selected from the group consisting of SEQ ID NOS: 1174-1183.

196. The pharmaceutical composition of any one of claims 1-11, wherein the at least one guide RNA or a nucleic acid encoding at least one guide RNA targets a mammalian IL18 gene.

197. The pharmaceutical composition of claim 196, wherein the mammalian IL18 gene is a human IL18 gene.

198. The pharmaceutical composition of claim 197, wherein the at least one guide RNA comprises a crRNA sequence selected from the group consisting of those sequences shown in FIG. 44 (SEQ ID NOS: 1222-1238).

199. The pharmaceutical composition of claim 197, wherein the at least one guide RNA comprises a crRNA sequence selected from the group consisting of SEQ ID NOS: 1222-1231.

200. The pharmaceutical composition of any one of claims 1-11, wherein the at least one guide RNA or a nucleic acid encoding at least one guide RNA targets a mammalian IL18RAP gene.

201. The pharmaceutical composition of claim 200, wherein the mammalian IL18RAP gene is a human IL18RAP gene.

202. The pharmaceutical composition of claim 201, wherein the at least one guide RNA comprises a crRNA sequence selected from the group consisting of those sequences shown in FIG. 46 (SEQ ID NOS: 1263-1310).

203. The pharmaceutical composition of claim 201, wherein the at least one guide RNA comprises a crRNA sequence selected from the group consisting of SEQ ID NOS: 1263-1272.

204. The pharmaceutical composition of any one of claims 1-11, wherein the at least one guide RNA or a nucleic acid encoding at least one guide RNA targets a mammalian IL18R1 gene.

205. The pharmaceutical composition of claim 204, wherein the mammalian IL18R1 gene is a human IL18R1 gene.

206. The pharmaceutical composition of claim 205, wherein the at least one guide RNA comprises a crRNA sequence selected from the group consisting of those sequences shown in FIG. 45 (SEQ ID NOS: 1239-1262).

207. The pharmaceutical composition of claim 205, wherein the at least one guide RNA comprises a crRNA sequence selected from the group consisting of SEQ ID NOS: 1239-1248.

208. The pharmaceutical composition of any one of claims 1-11, wherein the at least one guide RNA or a nucleic acid encoding at least one guide RNA targets a mammalian SCN1A gene.

209. The pharmaceutical composition of claim 208, wherein the mammalian SCN1A gene is a human SCN1A gene.

210. The pharmaceutical composition of claim 209, wherein the at least one guide RNA comprises a crRNA sequence selected from the group consisting of those sequences shown in FIG. 63 (SEQ ID NOS: 1860-1907).

211. The pharmaceutical composition of claim 209, wherein the at least one guide RNA comprises a crRNA sequence selected from the group consisting of SEQ ID NOS: 1860-1869.

212. The pharmaceutical composition of any one of claims 1-11, wherein the at least one guide RNA or a nucleic acid encoding at least one guide RNA targets a mammalian SCN2A gene.

213. The pharmaceutical composition of claim 212, wherein the mammalian SCN2A gene is a human SCN2A gene.

214. The pharmaceutical composition of claim 213, wherein the at least one guide RNA comprises a crRNA sequence selected from the group consisting of those sequences shown in FIG. 64 (SEQ ID NOS: 1908-1955).

215. The pharmaceutical composition of claim 213, wherein the at least one guide RNA comprises a crRNA sequence selected from the group consisting of SEQ ID NOS: 1908-1917.

216. The pharmaceutical composition of any one of claims 1-11, wherein the at least one guide RNA or a nucleic acid encoding at least one guide RNA targets a mammalian SCN3A gene.

217. The pharmaceutical composition of claim 216, wherein the mammalian SCN3A gene is a human SCN3A gene.

218. The pharmaceutical composition of claim 217, wherein the at least one guide RNA comprises a crRNA sequence selected from the group consisting of those sequences shown in FIG. 65 (SEQ ID NOS: 1956-2003).

219. The pharmaceutical composition of claim 217, wherein the at least one guide RNA comprises a crRNA sequence selected from the group consisting of SEQ ID NOS: 1956-1965.

220. The pharmaceutical composition of any one of claims 1-11, wherein the at least one guide RNA or a nucleic acid encoding at least one guide RNA targets a mammalian SCN4A gene.

221. The pharmaceutical composition of claim 220, wherein the mammalian SCN4A gene is a human SCN4A gene.

222. The pharmaceutical composition of claim 221, wherein the at least one guide RNA comprises a crRNA sequence selected from the group consisting of those sequences shown in FIG. 66 (SEQ ID NOS: 2004-2051).

223. The pharmaceutical composition of claim 221, wherein the at least one guide RNA comprises a crRNA sequence selected from the group consisting of SEQ ID NOS: 2004-2013.

224. The pharmaceutical composition of any one of claims 1-11, wherein the at least one guide RNA or a nucleic acid encoding at least one guide RNA targets a mammalian SCN5A gene.

225. The pharmaceutical composition of claim 224, wherein the mammalian SCN5A gene is a human SCN5A gene.

226. The pharmaceutical composition of claim 225, wherein the at least one guide RNA comprises a crRNA sequence selected from the group consisting of those sequences shown in FIG. 67 (SEQ ID NOS: 2052-2099).

227. The pharmaceutical composition of claim 225, wherein the at least one guide RNA comprises a crRNA sequence selected from the group consisting of SEQ ID NOS: 2052-2061.

228. The pharmaceutical composition of any one of claims 1-11, wherein the at least one guide RNA or a nucleic acid encoding at least one guide RNA targets a mammalian SCN8A gene.

229. The pharmaceutical composition of claim 228, wherein the mammalian SCN8A gene is a human SCN8A gene.

230. The pharmaceutical composition of claim 229, wherein the at least one guide RNA comprises a crRNA sequence selected from the group consisting of those sequences shown in FIG. 68 (SEQ ID NOS: 2100-2147).

231. The pharmaceutical composition of claim 229, wherein the at least one guide RNA comprises a crRNA sequence selected from the group consisting of SEQ ID NOS: 2100-2109.

232. The pharmaceutical composition of any one of claims 1-11, wherein the at least one guide RNA or a nucleic acid encoding at least one guide RNA targets a mammalian SCN9A gene.

233. The pharmaceutical composition of claim 232, wherein the mammalian SCN9A gene is a human SCN9A gene.

234. The pharmaceutical composition of claim 233, wherein the at least one guide RNA comprises a crRNA sequence selected from the group consisting of those sequences shown in FIG. 69 (SEQ ID NOS: 2148-2195).

235. The pharmaceutical composition of claim 233, wherein the at least one guide RNA comprises a crRNA sequence selected from the group consisting of SEQ ID NOS: 2148-2157.

236. The pharmaceutical composition of any one of claims 1-11, wherein the at least one guide RNA or a nucleic acid encoding at least one guide RNA targets a mammalian SCN10A gene.

237. The pharmaceutical composition of claim 236, wherein the mammalian SCN10A gene is a human SCN10A gene.

238. The pharmaceutical composition of claim 237, wherein the at least one guide RNA comprises a crRNA sequence selected from the group consisting of those sequences shown in FIG. 70 (SEQ ID NOS: 2196-2243).

239. The pharmaceutical composition of claim 237, wherein the at least one guide RNA comprises a crRNA sequence selected from the group consisting of SEQ ID NOS: 2196-2205.

240. The pharmaceutical composition of any one of claims 1-11, wherein the at least one guide RNA or a nucleic acid encoding at least one guide RNA targets a mammalian SCN11A gene.

241. The pharmaceutical composition of claim 240, wherein the mammalian SCN11A gene is a human SCN11A gene.

242. The pharmaceutical composition of claim 241, wherein the at least one guide RNA comprises a crRNA sequence selected from the group consisting of those sequences shown in FIG. 71 (SEQ ID NOS: 2244-2291).

243. The pharmaceutical composition of claim 241, wherein the at least one guide RNA comprises a crRNA sequence selected from the group consisting of SEQ ID NOS: 2244-2253.

244. The pharmaceutical composition of any one of claims 1-11, wherein the at least one guide RNA or a nucleic acid encoding at least one guide RNA targets a mammalian TAC1 gene.

245. The pharmaceutical composition of claim 244, wherein the mammalian TAC1 gene is a human TAC1 gene.

246. The pharmaceutical composition of claim 245, wherein the at least one guide RNA comprises a crRNA sequence selected from the group consisting of those sequences shown in FIG. 72 (SEQ ID NOS: 2292-2308).

247. The pharmaceutical composition of claim 245, wherein the at least one guide RNA comprises a crRNA sequence selected from the group consisting of SEQ ID NOS: 2292-2308.

248. The pharmaceutical composition of any one of claims 1-11, wherein the at least one guide RNA or a nucleic acid encoding at least one guide RNA targets a mammalian TACR1 gene.

249. The pharmaceutical composition of claim 248, wherein the mammalian TACR1 gene is a human TACR1 gene.

250. The pharmaceutical composition of claim 249, wherein the at least one guide RNA comprises a crRNA sequence selected from the group consisting of those sequences shown in FIG. 74 (SEQ ID NOS: 2326-2373).

251. The pharmaceutical composition of claim 249, wherein the at least one guide RNA comprises a crRNA sequence selected from the group consisting of SEQ ID NOS: 2326-2335.

252. The pharmaceutical composition of any one of claims 1-11, wherein the at least one guide RNA or a nucleic acid encoding at least one guide RNA targets a mammalian MRGPRX gene.

253. The pharmaceutical composition of claim 252, wherein the mammalian MRGPRX gene is a human MRGPRX gene.

254. The pharmaceutical composition of claim 253, wherein the at least one guide RNA comprises a crRNA sequence selected from the group consisting of those sequences shown in FIGS. $61a (SEQ ID NOS:$61b).

255. The pharmaceutical composition of claim 253, wherein the at least one guide RNA comprises a crRNA sequence selected from the group consisting of SEQ ID NOS:$61c.

256. The pharmaceutical composition of any one of claims 1-11, wherein the at least one guide RNA or a nucleic acid encoding at least one guide RNA targets a mammalian ATP1A1 gene.

257. The pharmaceutical composition of claim 256, wherein the mammalian ATP1A1 gene is a human ATP1A1 gene.

258. The pharmaceutical composition of claim 257, wherein the at least one guide RNA comprises a crRNA sequence selected from the group consisting of those sequences shown in FIG. 5 (SEQ ID NOS:193-240).

259. The pharmaceutical composition of claim 257, wherein the at least one guide RNA comprises a crRNA sequence selected from the group consisting of SEQ ID NOS:193-202.

260. The pharmaceutical composition of any one of claims 1-11, wherein the at least one guide RNA or a nucleic acid encoding at least one guide RNA targets a mammalian TACR2 gene.

261. The pharmaceutical composition of claim 260, wherein the mammalian TACR2 gene is a human TACR2 gene.

262. The pharmaceutical composition of claim 261, wherein the at least one guide RNA comprises a crRNA sequence selected from the group consisting of those sequences shown in FIG. 75 (SEQ ID NOS: 2374-2421).

263. The pharmaceutical composition of claim 261, wherein the at least one guide RNA comprises a crRNA sequence selected from the group consisting of SEQ ID NOS: 2374-2383.

264. The pharmaceutical composition of any one of claims 1-11, wherein the at least one guide RNA or a nucleic acid encoding at least one guide RNA targets a mammalian TAC3 gene.

265. The pharmaceutical composition of claim 264, wherein the mammalian TAC3 gene is a human TAC3 gene.

266. The pharmaceutical composition of claim 265, wherein the at least one guide RNA comprises a crRNA sequence selected from the group consisting of those sequences shown in FIG. 73 (SEQ ID NOS: 2309-2325).

267. The pharmaceutical composition of claim 265, wherein the at least one guide RNA comprises a crRNA sequence selected from the group consisting of SEQ ID NOS: 2309-2318.

268. The pharmaceutical composition of any one of claims 1-11, wherein the at least one guide RNA or a nucleic acid encoding at least one guide RNA targets a mammalian TACR3 gene.

269. The pharmaceutical composition of claim 268, wherein the mammalian TACR3 gene is a human TACR3 gene.

270. The pharmaceutical composition of claim 269, wherein the at least one guide RNA comprises a crRNA sequence selected from the group consisting of those sequences shown in FIG. 76 (SEQ ID NOS: 2422-2469).

271. The pharmaceutical composition of claim 269, wherein the at least one guide RNA comprises a crRNA sequence selected from the group consisting of SEQ ID NOS: 2422-2431.

272. The pharmaceutical composition of any one of claims 1-11, wherein the at least one guide RNA or a nucleic acid encoding at least one guide RNA targets a mammalian CALCA gene.

273. The pharmaceutical composition of claim 272, wherein the mammalian CALCA gene is a human CALCA gene.

274. The pharmaceutical composition of claim 273, wherein the at least one guide RNA comprises a crRNA sequence selected from the group consisting of those sequences shown in FIG. 7 (SEQ ID NOS:282-301).

275. The pharmaceutical composition of claim 273, wherein the at least one guide RNA comprises a crRNA sequence selected from the group consisting of SEQ ID NOS:282-291.

276. The pharmaceutical composition of any one of claims 1-11, wherein the at least one guide RNA or a nucleic acid encoding at least one guide RNA targets a mammalian CALCB gene.

277. The pharmaceutical composition of claim 276, wherein the mammalian CALCB gene is a human CALCB gene.

278. The pharmaceutical composition of claim 277, wherein the at least one guide RNA comprises a crRNA sequence selected from the group consisting of those sequences shown in FIG. 8 (SEQ ID NOS:302-318).

279. The pharmaceutical composition of claim 277, wherein the at least one guide RNA comprises a crRNA sequence selected from the group consisting of SEQ ID NOS:302-312.

280. The pharmaceutical composition of any one of claims 1-11, wherein the at least one guide RNA or a nucleic acid encoding at least one guide RNA targets a mammalian RAMP1 gene.

281. The pharmaceutical composition of claim 280, wherein the mammalian RAMP1 gene is a human RAMP1 gene.

282. The pharmaceutical composition of claim 281, wherein the at least one guide RNA comprises a crRNA sequence selected from the group consisting of those sequences shown in FIG. 62 (SEQ ID NOS: 1843-1859).

283. The pharmaceutical composition of claim 281, wherein the at least one guide RNA comprises a crRNA sequence selected from the group consisting of SEQ ID NOS: 1843-1852.

284. The pharmaceutical composition of any one of claims 1-11, wherein the at least one guide RNA or a nucleic acid encoding at least one guide RNA targets a mammalian CALCRL gene.

285. The pharmaceutical composition of claim 284, wherein the mammalian CALCRL gene is a human CALCRL gene.

286. The pharmaceutical composition of claim 285, wherein the at least one guide RNA comprises a crRNA sequence selected from the group consisting of those sequences shown in FIG. 9 (SEQ ID NOS:319-340).

287. The pharmaceutical composition of claim 285, wherein the at least one guide RNA comprises a crRNA sequence selected from the group consisting of SEQ ID NOS:319-328.

288. The pharmaceutical composition of any one of claims 1-11, wherein the at least one guide RNA or a nucleic acid encoding at least one guide RNA targets a mammalian ADM gene.

289. The pharmaceutical composition of claim 284, wherein the mammalian ADM gene is a human ADM gene.

290. The pharmaceutical composition of claim 285, wherein the at least one guide RNA comprises a crRNA sequence selected from the group consisting of those sequences shown in FIG. 4 (SEQ ID NOS:145-192).

291. The pharmaceutical composition of claim 285, wherein the at least one guide RNA comprises a crRNA sequence selected from the group consisting of SEQ ID NOS: 145-1542.

292. The pharmaceutical composition of any one of claims 1-11, wherein the at least one guide RNA or a nucleic acid encoding at least one guide RNA targets a mammalian CRCP gene.

293. The pharmaceutical composition of claim 292, wherein the mammalian CRCP gene is a human CRCP gene.

294. The pharmaceutical composition of claim 293, wherein the at least one guide RNA comprises a crRNA sequence selected from the group consisting of those sequences shown in FIG. 17 (SEQ ID NOS: 518-534).

295. The pharmaceutical composition of claim 293, wherein the at least one guide RNA comprises a crRNA sequence selected from the group consisting of SEQ ID NOS: 518-527.

296. The pharmaceutical composition of any one of claims 1-11, wherein the at least one guide RNA or a nucleic acid encoding at least one guide RNA targets a mammalian NGF gene.

297. The pharmaceutical composition of claim 296, wherein the mammalian NGF gene is a human NGF gene.

298. The pharmaceutical composition of claim 297, wherein the at least one guide RNA comprises a crRNA sequence selected from the group consisting of those sequences shown in FIG. 56 (SEQ ID NOS: 1586-1628).

299. The pharmaceutical composition of claim 297, wherein the at least one guide RNA comprises a crRNA sequence selected from the group consisting of SEQ ID NOS: 1586-1595.

300. The pharmaceutical composition of any one of claims 1-11, wherein the at least one guide RNA or a nucleic acid encoding at least one guide RNA targets a mammalian NGFR gene.

301. The pharmaceutical composition of claim 300, wherein the mammalian NGFR gene is a human NGFR gene.

302. The pharmaceutical composition of claim 301, wherein the at least one guide RNA comprises a crRNA sequence selected from the group consisting of those sequences shown in FIG. 57 (SEQ ID NOS: 1629-1676).

303. The pharmaceutical composition of claim 301, wherein the at least one guide RNA comprises a crRNA sequence selected from the group consisting of SEQ ID NOS: 1629-1638.

304. The pharmaceutical composition of any one of claims 1-11, wherein the at least one guide RNA or a nucleic acid encoding at least one guide RNA targets a mammalian NTRK1 gene.

305. The pharmaceutical composition of claim 304, wherein the mammalian NTRK11 gene is a human NTRK1 gene.

306. The pharmaceutical composition of claim 305, wherein the at least one guide RNA comprises a crRNA sequence selected from the group consisting of those sequences shown in FIG. 60 (SEQ ID NOS: 1747-1794).

307. The pharmaceutical composition of claim 305, wherein the at least one guide RNA comprises a crRNA sequence selected from the group consisting of SEQ ID NOS: 1747-1756.

308. The pharmaceutical composition of any one of claims 1-11, wherein the at least one guide RNA or a nucleic acid encoding at least one guide RNA targets a mammalian NTF3 gene.

309. The pharmaceutical composition of claim 308, wherein the mammalian NTF3 gene is a human NTF3 gene.

310. The pharmaceutical composition of claim 309, wherein the at least one guide RNA comprises a crRNA sequence selected from the group consisting of those sequences shown in FIG. 58 (SEQ ID NOS: 1677-1724).

311. The pharmaceutical composition of claim 309, wherein the at least one guide RNA comprises a crRNA sequence selected from the group consisting of SEQ ID NOS: 1677-1686.

312. The pharmaceutical composition of any one of claims 1-11, wherein the at least one guide RNA or a nucleic acid encoding at least one guide RNA targets a mammalian NTF4 gene.

313. The pharmaceutical composition of claim 312, wherein the mammalian NTF4 gene is a human NTF4 gene.

314. The pharmaceutical composition of claim 313, wherein the at least one guide RNA comprises a crRNA sequence selected from the group consisting of those sequences shown in FIG. 59 (SEQ ID NOS: 1725-1746).

315. The pharmaceutical composition of claim 313, wherein the at least one guide RNA comprises a crRNA sequence selected from the group consisting of SEQ ID NOS: 1725-1734.

316. The pharmaceutical composition of any one of claims 1-11, wherein the at least one guide RNA or a nucleic acid encoding at least one guide RNA targets a mammalian NTRK2 gene.

317. The pharmaceutical composition of claim 316, wherein the mammalian NTRK2 gene is a human NTRK2 gene.

318. The pharmaceutical composition of claim 317, wherein the at least one guide RNA comprises a crRNA sequence selected from the group consisting of those sequences shown in FIG. 61 (SEQ ID NOS: 1795-1842).

319. The pharmaceutical composition of claim 317, wherein the at least one guide RNA comprises a crRNA sequence selected from the group consisting of SEQ ID NOS: 1795-1804.

320. The pharmaceutical composition of any one of claims 1-11, wherein the at least one guide RNA or a nucleic acid encoding at least one guide RNA targets a mammalian IL1RAP gene.

321. The pharmaceutical composition of claim 320, wherein the mammalian IL1RAP gene is a human IL1RAP gene.

322. The pharmaceutical composition of claim 321, wherein the at least one guide RNA comprises a crRNA sequence selected from the group consisting of those sequences shown in FIG. 31 (SEQ ID NOS: 840-887).

323. The pharmaceutical composition of claim 321, wherein the at least one guide RNA comprises a crRNA sequence selected from the group consisting of SEQ ID NOS: 840-849.

324. The pharmaceutical composition of any one of claims 1-11, wherein the at least one guide RNA or a nucleic acid encoding at least one guide RNA targets a mammalian IL1α gene.

325. The pharmaceutical composition of claim 324, wherein the mammalian IL1α gene is a human IL1α gene.

326. The pharmaceutical composition of claim 325, wherein the at least one guide RNA comprises a crRNA sequence selected from the group consisting of those sequences shown in FIG. $80a (SEQ ID NOS:$80b).

327. The pharmaceutical composition of claim 325, wherein the at least one guide RNA comprises a crRNA sequence selected from the group consisting of SEQ ID NOS:$80c.

328. The pharmaceutical composition of any one of claims 1-11, wherein the at least one guide RNA or a nucleic acid encoding at least one guide RNA targets a mammalian IL1(gene.

329. The pharmaceutical composition of claim 328, wherein the mammalian IL1P gene is a human IL1I3 gene.

330. The pharmaceutical composition of claim 329, wherein the at least one guide RNA comprises a crRNA sequence selected from the group consisting of those sequences shown in FIG. $81a (SEQ ID NOS:$81b).

331. The pharmaceutical composition of claim 329, wherein the at least one guide RNA comprises a crRNA sequence selected from the group consisting of SEQ ID NOS:$81c.

332. The pharmaceutical composition of any one of claims 1-11, wherein the at least one guide RNA or a nucleic acid encoding at least one guide RNA targets a mammalian BDNF gene.

333. The pharmaceutical composition of claim 332, wherein the mammalian BDNF gene is a human BDNF gene.

334. The pharmaceutical composition of claim 333, wherein the at least one guide RNA comprises a crRNA sequence selected from the group consisting of those sequences shown in FIG. 6 (SEQ ID NOS:241-281).

335. The pharmaceutical composition of claim 333, wherein the at least one guide RNA comprises a crRNA sequence selected from the group consisting of SEQ ID NOS:241-250.

336. [IL6ST] The pharmaceutical composition of any one of claims 1-11, wherein the at least one guide RNA or a nucleic acid encoding at least one guide RNA targets a mammalian IL6ST gene.

337. The pharmaceutical composition of claim 336, wherein the mammalian BDNF gene is a human IL6ST gene.

338. The pharmaceutical composition of claim 336, wherein the at least one guide RNA comprises a crRNA sequence selected from the group consisting of those sequences shown in FIG. 35 (SEQ ID NOS: 964-990).

339. The pharmaceutical composition of claim 336, wherein the at least one guide RNA comprises a crRNA sequence selected from the group consisting of SEQ ID NOS: 964-973.

340. The pharmaceutical composition of any one of claims 16-19, 116-123, 136-143, 148-151, 156-163, 168-175, 180-187, 192-195, 200-207, 248-255, 260-263, 268-271, 280-287, 300-307, and 316-323, wherein the targeted gene is a transmembrane receptor and the at least one guide RNA targets a portion of the targeted gene encoding a transmembrane spanning portion of the transmembrane receptor.

341. The pharmaceutical composition of any one of claims 16-19, 116-123, 136-143, 148-151, 156-163, 168-175, 180-187, 192-195, 200-207, 248-255, 260-263, 268-271, 280-287, 300-307, and 316-323, wherein the targeted gene is a transmembrane receptor and the at least one guide RNA targets a portion of the targeted gene encoding a cytoplasmic portion of the transmembrane receptor.

342. The pharmaceutical composition of any one of claims 1-341, wherein the RNA-guided nuclease or a nucleic acid encoding an RNA-guided nuclease is the RNA-guided nuclease.

343. The pharmaceutical composition of any one of claims 1-341, wherein the RNA-guided nuclease or a nucleic acid encoding an RNA-guided nuclease is DNA encoding the RNA-guided nuclease.

344. The pharmaceutical composition of any one of claims 1-341, wherein the RNA-guided nuclease or a nucleic acid encoding an RNA-guided nuclease is mRNA encoding the RNA-guided nuclease.

345. The pharmaceutical composition of any one of claims 1-344, wherein the RNA-guided nuclease is a Cas protein.

346. The pharmaceutical composition of claim 345, wherein the Cas protein is a Cas9 protein.

347. The pharmaceutical composition of claim 345, wherein the Cas9 protein is an S. pyogenes Cas9 polypeptide.

348. The pharmaceutical composition of claim 347, wherein the S. pyogenes Cas9 polypeptide comprises an R691A amino acid substitution.

349. The pharmaceutical composition of claim 347, wherein the S. pyogenes Cas9 polypeptide comprises K848A, K1003A, and R1060A amino acid substitutions.

350. The pharmaceutical composition of claim 347, wherein the S. pyogenes Cas9 polypeptide comprises a set of one or more amino acid substitutions selected from the group consisting of D10A, H840A, D1135E, D1135E, K810A/K1003A/R1060A, K848A/K1003A/R1060A, N497A/R661A/Q695A/Q926A, N692NA/M694A/Q695A/H698A, R691A, E108G/S217A/A262T, S409I/E480K/E543D/M694I/E1219V, F539S/M763I/K890N, and M495V/Y515N/K526E/R661Q.

351. The pharmaceutical composition of any one of claims 1-350, wherein the at least one guide RNA or a nucleic acid encoding at least one guide RNA is the at least one guide RNA.

352. The pharmaceutical composition of any one of claims 1-350, wherein the at least one guide RNA or a nucleic acid encoding at least one guide RNA is DNA encoding the at least one guide RNA.

353. The pharmaceutical composition of any one of claims 1-350, comprising a nucleic acid encoding both the RNA-guided nuclease and the at least one guide RNA.

354. The pharmaceutical composition of any one of claims 1-350, wherein the at least one guide RNA is a single guide RNA (sgRNA).

355. The pharmaceutical composition of any one of claims 1-354, wherein the composition comprises one or more viral vectors collectively comprising the (i) RNA-guided nuclease or a nucleic acid encoding an RNA-guided nuclease, and (ii) at least one guide RNA or a nucleic acid encoding at least one guide RNA targeting a gene encoding the transmembrane receptor.

356. The pharmaceutical composition of claim 355, wherein the one of more viral vectors comprise a recombinant virus selected from a retrovirus, an adenovirus, an adeno-associated virus, a lentivirus, and a herpes simplex virus-1.

357. The pharmaceutical composition of claim 355, wherein the one of more viral vectors comprise a recombinant adeno-associated virus (AAV).

358. The pharmaceutical composition of claim 357, wherein the recombinant AAV is of serotype 5 (AAV5).

359. The pharmaceutical composition of claim 357, wherein the recombinant AAV is of serotype 6 (AAV6).

360. The pharmaceutical composition of any one of claims 1-354, wherein the composition comprises one or more lipid nanoparticles (LNP) collectively comprising the (i) RNA-guided nuclease or a nucleic acid encoding an RNA-guided nuclease, and (ii) at least one guide RNA or a nucleic acid encoding at least one guide RNA targeting a gene encoding the transmembrane receptor.

361. The pharmaceutical composition of claim 360, wherein the one or more LNP comprises:
a first plurality of LNP encapsulating the RNA-guided nuclease or a nucleic acid encoding an RNA-guided nuclease; and
a second plurality of LNP encapsulating the at least one guide RNA or a nucleic acid encoding at least one guide RNA.

362. The pharmaceutical composition of claim 360, wherein the one or more LNP comprises a plurality of LNP encapsulating both the (i) RNA-guided nuclease or a nucleic acid encoding an RNA-guided nuclease, and (ii) at least one guide RNA or a nucleic acid encoding at least one guide RNA targeting a gene encoding the transmembrane receptor.

363. The pharmaceutical composition of any one of claims 360-362, wherein the one or more LNP comprises a component selected from the group consisting of 3-(didodecylamino)-N1,N1,4-tridodecyl-1-piperazineethanamine (KL10), N1-[2-(didodecylamino)ethyl]-N1,N4,N4-tridodecyl-1,4-piperazinediethanamine (KL22), 14,25-ditridecyl-15,18,21,24-tetraaza-octatriacontane (KL25), 1,2-dilinoleyloxy-N,N-dimethylaminopropane (DLin-DMA), 2,2-dilinoleyl-4-dimethylaminomethyl-[1,3]-dioxolane (DLin-K-DMA), heptatriaconta-6,9,28,31-tetraen-19-yl 4-(dimethylamino)butanoate (DLin-MC3-DMA), 2,2-dilinoleyl-4-(2-dimethylaminoethyl)-[1,3]-dioxolane (DLin-KC2-DMA), 1,2-dioleyloxy-N,N-dimethylaminopropane (DODMA), 2-({8-[(3.beta.)-cholest-5-en-3-yloxy]octyl}oxy)-N,N-dimethyl-3-[(9Z,12Z)--octadeca-9,12-dien-1-yloxy]propan-1-amine (Octyl-CLinDMA), (2R)-2-({8-[(3.beta.)-cholest-5-en-3-yloxy]octyl}oxy)-N,N-dimethyl-3-[(9Z-,12Z)-octadeca-9,12-dien-1-yloxy]propan-1-amine (Octyl-CLinDMA (2R)), (2S)-2-({8-[(3.beta.)-cholest-5-en-3-yloxy]octyl}oxy)-N,N-dimethyl-3-[(9Z-,12Z)-octadeca-9,12-dien-1-yloxy]propan-1-amine (Octyl-CLinDMA (2S)), a lipid including a cyclic amine group, and a mixture thereof.

364. The pharmaceutical composition of any one of claims 360-363, wherein the LNP comprises a component selected from the group consisting of 1,2-dilinoleoyl-sn-glycero-3-phosphocholine (DLPC), 1,2-dimyristoyl-sn-glycero-phosphocholine (DMPC), 1,2-dioleoyl-sn-glycero-3-phosphocholine (DOPC), 1,2-dipalmitoyl-sn-glycero-3-phosphocholine (DPPC), 1,2-distearoyl-sn-glycero-3-phosphocholine (DSPC), 1,2-diundecanoyl-sn-glycero-phosphocholine (DUPC), 1-palmitoyl-2-oleoyl-sn-glycero-3-phosphocholine (POPC), 1,2-di-O-octadecenyl-sn-glycero-3-phosphocholine (18:0 Diether PC), 1-oleoyl-2-cholesterylhemisuccinoyl-sn-glycero-3-phosphocholine (OChemsPC), 1-hexadecyl-sn-glycero-3-phosphocholine (C16 Lyso PC), 1,2-dilinolenoyl-sn-glycero-3-phosphocholine, 1,2-diarachidonoyl-sn-glycero-3-phosphocholine, 1,2-didocosahexaenoyl-sn-glycero-3-phosphocholine, 1,2-dioleoyl-sn-glycero-3-phosphoethanolamine (DOPE), 1,2-diphytanoyl-sn-glycero-3-phosphoethanolamine (ME 16.0 PE), 1,2-distearoyl-sn-glycero-3-phosphoethanolamine, 1,2-dilinoleoyl-sn-glycero-3-phosphoethanolamine, 1,2-dilinolenoyl-sn-glycero-3-phosphoethanolamine, 1,2-diarachidonoyl-sn-glycero-3-phosphoethanolamine, 1,2-didocosahexaenoyl-sn-glycero-3-phosphoethanolamine, 1,2-dioleoyl-sn-glycero-3-phospho-rac-(1-glycerol) sodium salt (DOPG), sphingomyelin (SM), and a mixture thereof.

365. The pharmaceutical composition of any one of claims 360-364, wherein the LNP comprises a component selected from the group consisting of PEG-modified phosphatidylethanolamines, PEG-modified phosphatidic acids, PEG-modified ceramides, PEG-modified dialkylamines, PEG-modified diacylglycerols, PEG-modified dialkylglycerols, and mixtures thereof. For example, a PEG lipid may be PEG-c-DOMG, PEG-DMG, PEG-DLPE, PEG-DMPE, PEG-DPPC, PEG-DMA, a PEG-DSPE lipid, and a mixture thereof.

366. The pharmaceutical composition of any one of claims 360-365, wherein the LNP comprises a component selected from the group consisting of a cholesterol, fecosterol, stigmasterol, stigmastanol, sitosterol, β-sitosterol, lupeol, betulin, ursolic acid, oleanolic acid, campesterol, fucosterol, brassicasterol, ergosterol, 9,11-dehydroergosterol, tomatidine, tomatine, α-tocopherol, and a mixture thereof.

367. The pharmaceutical composition of any one of claims 1-354, wherein the composition comprises one or more liposomes collectively comprising the (i) RNA-guided nuclease or a nucleic acid encoding an RNA-guided nuclease, and (ii) at least one guide RNA or a nucleic acid encoding at least one guide RNA targeting a gene encoding the transmembrane receptor.

368. The pharmaceutical composition of claim 367, wherein the one or more liposomes comprises:
a first plurality of liposomes encapsulating the RNA-guided nuclease or a nucleic acid encoding an RNA-guided nuclease; and
a second plurality of liposomes encapsulating the at least one guide RNA or a nucleic acid encoding at least one guide RNA.

369. The pharmaceutical composition of claim 367, wherein the one or more liposomes comprises a plurality of liposomes encapsulating both the (i) RNA-guided nuclease or a nucleic acid encoding an RNA-guided nuclease, and (ii) at least one guide RNA or a nucleic acid encoding at least one guide RNA targeting a gene encoding the transmembrane receptor.

370. The pharmaceutical composition of any one of claims 1-354, wherein the composition comprises one or more virus-like particles collectively comprising the (i) RNA-guided nuclease or a nucleic acid encoding an RNA-guided nuclease, and (ii) at least one guide RNA or a nucleic acid encoding at least one guide RNA targeting a gene encoding the transmembrane receptor.

371. The pharmaceutical composition of claim 370, wherein the one or more virus-like particles comprises:

372. a first plurality of virus-like particles encapsulating the RNA-guided nuclease or a nucleic acid encoding an RNA-guided nuclease; and

373. a second plurality of virus-like particles encapsulating the at least one guide RNA or a nucleic acid encoding at least one guide RNA.

374. The pharmaceutical composition of claim 370, wherein the one or more virus-like particles comprises a plurality of virus-like particles encapsulating both the (i) RNA-guided nuclease or a nucleic acid encoding an RNA-guided nuclease, and (ii) at least one guide RNA or a nucleic acid encoding at least one guide RNA targeting a gene encoding the transmembrane receptor.

375. The pharmaceutical composition of any one of claims 1-374, wherein the composition is formulated for parenteral administration.

376. The pharmaceutical composition of any one of claims 1-374, wherein the composition is formulated for intradiscal injection.

377. A method for treating a spinal disorder in a mammalian subject in need thereof, comprising administering a therapeutically effective amount of a pharmaceutical composition according to any one of claims 1-376 to the subject.

378. The method of claim 377, wherein the spinal disorder is intervertebral disc degeneration.

379. The method of claim 377, wherein the spinal disorder is disc herniation.

380. The method of claim 377, wherein the spinal disorder is spinal stenosis.

381. The method of claim 377, wherein the spinal disorder is spondylosis.

382. The method of claim 377, wherein the spinal disorder is spondylolisthesis.

383. The method of claim 377, wherein the spinal disorder is a spinal infection.

384. The method of claim 383, wherein the spinal infection is discospondylitis.

385. The method of claim 377, wherein the spinal disorder is a spinal neuropathy.

386. The method of claim 385, wherein the spinal neuropathy is discogenic pain, radiculopathy, sciatica, or post-herpetic neuralgia.

387. The method of any one of claims 377-386, wherein the method is for treating low back pain or neck pain associated with the spinal disorder.

388. The method of any one of claims 377-387, wherein the administering comprises parenteral administration.

389. The method of any one of claims 377-387, wherein the administering comprises intradiscal injection.

390. A pharmaceutical composition according to any one of claims 1-376 for use in a method for the treatment of a spinal disorder.

391. Use of a pharmaceutical composition according to any one of claims 1-376 for the manufacture of a medicament for treatment of a spinal disorder.

The application's sequence listing, which the Patent Office published only in electronic form, follows.

SEQUENCE LISTING (2718 sequences)

SEQ ID NO: 1 - RNA, 20 nt, synthetic construct
  misc_feature 1..20: note = Synthetic
  source 1..20: mol_type = other RNA
ccgaagcccgggtcatccgg

SEQ ID NO: 2 - RNA, 20 nt, synthetic construct
  misc_feature 1..20: note = Synthetic
  source 1..20: mol_type = other RNA
ctgacgctgcagtttaaagg

SEQ ID NO: 3 - RNA, 20 nt, synthetic construct
  misc_feature 1..20: note = Synthetic
  source 1..20: mol_type = other RNA
tggcgccgaagggatcacag

SEQ ID NO: 4 - RNA, 20 nt, synthetic construct
  misc_feature 1..20: note = Synthetic
  source 1..20: mol_type = other RNA
tggggccgaatataacatag

SEQ ID NO: 5 - RNA, 20 nt, synthetic construct
  misc_feature 1..20: note = Synthetic
  source 1..20: mol_type = other RNA
tctcctattcctgaccagcg

SEQ ID NO: 6 - RNA, 20 nt, synthetic construct
  misc_feature 1..20: note = Synthetic
  source 1..20: mol_type = other RNA
ttggagctgctggcgccgaa

SEQ ID NO: 7 - RNA, 20 nt, synthetic construct
  misc_feature 1..20: note = Synthetic
  source 1..20: mol_type = other RNA
agcgactgcacgttgaagga

SEQ ID NO: 8 - RNA, 20 nt, synthetic construct
  misc_feature 1..20: note = Synthetic
  source 1..20: mol_type = other RNA
caacagcgactgcacgttga

SEQ ID NO: 9 - RNA, 20 nt, synthetic construct
  misc_feature 1..20: note = Synthetic
  source 1..20: mol_type = other RNA
agtttgtgggaactcgaggg

SEQ ID NO: 10 - RNA, 20 nt, synthetic construct
  misc_feature 1..20: note = Synthetic
  source 1..20: mol_type = other RNA
agcagaatgtgccccgaatg

SEQ ID NO: 11 - RNA, 20 nt, synthetic construct
  misc_feature 1..20: note = Synthetic
  source 1..20: mol_type = other RNA
gtagcggggccgggaacatg

SEQ ID NO: 12 - RNA, 20 nt, synthetic construct
  misc_feature 1..20: note = Synthetic
  source 1..20: mol_type = other RNA
gcgattaatgctacttgcaa

SEQ ID NO: 13 - RNA, 20 nt, synthetic construct
  misc_feature 1..20: note = Synthetic
  source 1..20: mol_type = other RNA
taaagtttgtgggaactcga

SEQ ID NO: 14 - RNA, 20 nt, synthetic construct
  misc_feature 1..20: note = Synthetic
  source 1..20: mol_type = other RNA
ggacttcttcactggacacg

SEQ ID NO: 15 - RNA, 20 nt, synthetic construct
  misc_feature 1..20: note = Synthetic
  source 1..20: mol_type = other RNA
ccgcgacctccggatgaccc

SEQ ID NO: 16 - RNA, 20 nt, synthetic construct
  misc_feature 1..20: note = Synthetic
  source 1..20: mol_type = other RNA
atgcatccctttctgcgaga

SEQ ID NO: 17 - RNA, 20 nt, synthetic construct
  misc_feature 1..20: note = Synthetic
  source 1..20: mol_type = other RNA
aagtagcattaatcgcctcc

SEQ ID NO: 18 - RNA, 20 nt, synthetic construct
  misc_feature 1..20: note = Synthetic
  source 1..20: mol_type = other RNA
ccctccctggtcctcattcg

SEQ ID NO: 19 - RNA, 20 nt, synthetic construct
  misc_feature 1..20: note = Synthetic
  source 1..20: mol_type = other RNA
tagcttattatagcccagtt

SEQ ID NO: 20 - RNA, 20 nt, synthetic construct
  misc_feature 1..20: note = Synthetic
  source 1..20: mol_type = other RNA
ggtctttaccgagtctctgg

SEQ ID NO: 21 - RNA, 20 nt, synthetic construct
  misc_feature 1..20: note = Synthetic
  source 1..20: mol_type = other RNA
cagcacgaaaggaaccacgc

SEQ ID NO: 22 - RNA, 20 nt, synthetic construct
  misc_feature 1..20: note = Synthetic
  source 1..20: mol_type = other RNA
cacagactcacatatggacg

SEQ ID NO: 23 - RNA, 20 nt, synthetic construct
  misc_feature 1..20: note = Synthetic
  source 1..20: mol_type = other RNA
gtgatcgccactcacagcta

SEQ ID NO: 24 - RNA, 20 nt, synthetic construct
  misc_feature 1..20: note = Synthetic
  source 1..20: mol_type = other RNA
aacgttcagtacttgatgtc

SEQ ID NO: 25 - RNA, 20 nt, synthetic construct
  misc_feature 1..20: note = Synthetic
  source 1..20: mol_type = other RNA
ctggcgccgaagggatcaca

SEQ ID NO: 26 - RNA, 20 nt, synthetic construct
  misc_feature 1..20: note = Synthetic
  source 1..20: mol_type = other RNA
cgtcgaaatgctgagcagca

SEQ ID NO: 27 - RNA, 20 nt, synthetic construct
  misc_feature 1..20: note = Synthetic
  source 1..20: mol_type = other RNA
ctgggtctttaccgagtctc

SEQ ID NO: 28 - RNA, 20 nt, synthetic construct
  misc_feature 1..20: note = Synthetic
  source 1..20: mol_type = other RNA
cagcgtggttcctttcgtgc

SEQ ID NO: 29 - RNA, 20 nt, synthetic construct
  misc_feature 1..20: note = Synthetic
  source 1..20: mol_type = other RNA
ggtcgcggcgccagcacgaa

SEQ ID NO: 30 - RNA, 20 nt, synthetic construct
  misc_feature 1..20: note = Synthetic
  source 1..20: mol_type = other RNA
caacatcgttgggtctgtcc

SEQ ID NO: 31 - RNA, 20 nt, synthetic construct
  misc_feature 1..20: note = Synthetic
  source 1..20: mol_type = other RNA
gtcacaaaatcctactgtac

SEQ ID NO: 32 - RNA, 20 nt, synthetic construct
  misc_feature 1..20: note = Synthetic
  source 1..20: mol_type = other RNA
aatgcatccctttctgcgag

SEQ ID NO: 33 - RNA, 20 nt, synthetic construct
  misc_feature 1..20: note = Synthetic
  source 1..20: mol_type = other RNA
gggcactcactgctattacc

SEQ ID NO: 34 - RNA, 20 nt, synthetic construct
  misc_feature 1..20: note = Synthetic
  source 1..20: mol_type = other RNA
ataaagtttgtgggaactcg

SEQ ID NO: 35 - RNA, 20 nt, synthetic construct
  misc_feature 1..20: note = Synthetic
  source 1..20: mol_type = other RNA
gcgttcttgaaaacactcct

SEQ ID NO: 36 - RNA, 20 nt, synthetic construct
  misc_feature 1..20: note = Synthetic
  source 1..20: mol_type = other RNA
ggagcagaacatgatccgga

SEQ ID NO: 37 - RNA, 20 nt, synthetic construct
  misc_feature 1..20: note = Synthetic
  source 1..20: mol_type = other RNA
ccaattcatgagttgtaacc

SEQ ID NO: 38 - RNA, 20 nt, synthetic construct
  misc_feature 1..20: note = Synthetic
  source 1..20: mol_type = other RNA
catctatcggaacacttcat

SEQ ID NO: 39 - RNA, 20 nt, synthetic construct
  misc_feature 1..20: note = Synthetic
  source 1..20: mol_type = other RNA
catcgcttctacagatacat

SEQ ID NO: 40 - RNA, 20 nt, synthetic construct
  misc_feature 1..20: note = Synthetic
  source 1..20: mol_type = other RNA
tcatcgcttctacagataca

SEQ ID NO: 41 - RNA, 20 nt, synthetic construct
  misc_feature 1..20: note = Synthetic
  source 1..20: mol_type = other RNA
ttcttcactggacacgtggt

SEQ ID NO: 42 - RNA, 20 nt, synthetic construct
  misc_feature 1..20: note = Synthetic
  source 1..20: mol_type = other RNA
gtctttaccgagtctctggt

SEQ ID NO: 43 - RNA, 20 nt, synthetic construct
  misc_feature 1..20: note = Synthetic
  source 1..20: mol_type = other RNA
caaatgtgagaaacgagtac

SEQ ID NO: 44 - RNA, 20 nt, synthetic construct
  misc_feature 1..20: note = Synthetic
  source 1..20: mol_type = other RNA
tgctgttccctctcgcagaa

SEQ ID NO: 45 - RNA, 20 nt, synthetic construct
  misc_feature 1..20: note = Synthetic
  source 1..20: mol_type = other RNA
tgggctagaaccctagagtc

SEQ ID NO: 46 - RNA, 20 nt, synthetic construct
  misc_feature 1..20: note = Synthetic
  source 1..20: mol_type = other RNA
gccgcgacctccggatgacc

SEQ ID NO: 47 - RNA, 20 nt, synthetic construct
  misc_feature 1..20: note = Synthetic
  source 1..20: mol_type = other RNA
cgtgctggcgccgcgacctc

SEQ ID NO: 48 - RNA, 20 nt, synthetic construct
  misc_feature 1..20: note = Synthetic
  source 1..20: mol_type = other RNA
cgaaaggaaccacgctggtc

SEQ ID NO: 49 - RNA, 20 nt, synthetic construct
  misc_feature 1..20: note = Synthetic
  source 1..20: mol_type = other RNA
ctgccggttggcatcgtacg

SEQ ID NO: 50 - RNA, 20 nt, synthetic construct
  misc_feature 1..20: note = Synthetic
  source 1..20: mol_type = other RNA
tacatgtgctggctgcatcg

SEQ ID NO: 51 - RNA, 20 nt, synthetic construct
  misc_feature 1..20: note = Synthetic
  source 1..20: mol_type = other RNA
tgtgtccagtcaccgctatg

SEQ ID NO: 52 - RNA, 20 nt, synthetic construct
  misc_feature 1..20: note = Synthetic
  source 1..20: mol_type = other RNA
cgacgtcggcggcacgtgcg

SEQ ID NO: 53 - RNA, 20 nt, synthetic construct
  misc_feature 1..20: note = Synthetic
  source 1..20: mol_type = other RNA
ggagactgttcgagaacgtg

SEQ ID NO: 54 - RNA, 20 nt, synthetic construct
  misc_feature 1..20: note = Synthetic
  source 1..20: mol_type = other RNA
tggccgtgtcggacgcactc

SEQ ID NO: 55 - RNA, 20 nt, synthetic construct
  misc_feature 1..20: note = Synthetic
  source 1..20: mol_type = other RNA
atgcagcgagctgtgcccga

SEQ ID NO: 56 - RNA, 20 nt, synthetic construct
  misc_feature 1..20: note = Synthetic
  source 1..20: mol_type = other RNA
gactgttcgagaacgtgcgg

SEQ ID NO: 57 - RNA, 20 nt, synthetic construct
  misc_feature 1..20: note = Synthetic
  source 1..20: mol_type = other RNA
gcgcgtggtcccgtgtcccg

SEQ ID NO: 58 - RNA, 20 nt, synthetic construct
  misc_feature 1..20: note = Synthetic
  source 1..20: mol_type = other RNA
gtacgctggcgtctcaccaa

SEQ ID NO: 59 - RNA, 20 nt, synthetic construct
  misc_feature 1..20: note = Synthetic
  source 1..20: mol_type = other RNA
gttctcgaacagtctcccca

SEQ ID NO: 60 - RNA, 20 nt, synthetic construct
  misc_feature 1..20: note = Synthetic
  source 1..20: mol_type = other RNA
tcaaaccaaacacttcccgt

SEQ ID NO: 61 - RNA, 20 nt, synthetic construct
  misc_feature 1..20: note = Synthetic
  source 1..20: mol_type = other RNA
gcacctcgtacgatgccaac

SEQ ID NO: 62 - RNA, 20 nt, synthetic construct
  misc_feature 1..20: note = Synthetic
  source 1..20: mol_type = other RNA
gcttgtggcagaccagtcga

SEQ ID NO: 63 - RNA, 20 nt, synthetic construct
  misc_feature 1..20: note = Synthetic
  source 1..20: mol_type = other RNA
ggtttccacatagcggtgac

SEQ ID NO: 64 - RNA, 20 nt, synthetic construct
  misc_feature 1..20: note = Synthetic
  source 1..20: mol_type = other RNA
gccgcttccggaaaccgacc

SEQ ID NO: 65 - RNA, 20 nt, synthetic construct
  misc_feature 1..20: note = Synthetic
  source 1..20: mol_type = other RNA
gcttcacgctccagaacgtg

SEQ ID NO: 66 - RNA, 20 nt, synthetic construct
  misc_feature 1..20: note = Synthetic
  source 1..20: mol_type = other RNA
cggcttcacgctccagaacg

SEQ ID NO: 67 - RNA, 20 nt, synthetic construct
  misc_feature 1..20: note = Synthetic
  source 1..20: mol_type = other RNA
ctggccgtgtcggacgcact

SEQ ID NO: 68 - RNA, 20 nt, synthetic construct
  misc_feature 1..20: note = Synthetic
  source 1..20: mol_type = other RNA
cttgcgccttccgaacccct

SEQ ID NO: 69 - RNA, 20 nt, synthetic construct
  misc_feature 1..20: note = Synthetic
  source 1..20: mol_type = other RNA
ggtgagacgccagcgtactt

SEQ ID NO: 70 - RNA, 20 nt, synthetic construct
  misc_feature 1..20: note = Synthetic
  source 1..20: mol_type = other RNA
tgttcgagaacgtgcggtgg

SEQ ID NO: 71 - RNA, 20 nt, synthetic construct
  misc_feature 1..20: note = Synthetic
  source 1..20: mol_type = other RNA
aaccaaacacttcccgtggg

SEQ ID NO: 72 - RNA, 20 nt, synthetic construct
  misc_feature 1..20: note = Synthetic
  source 1..20: mol_type = other RNA
gtgtaccggcacctctggtg

SEQ ID NO: 73 - RNA, 20 nt, synthetic construct
  misc_feature 1..20: note = Synthetic
  source 1..20: mol_type = other RNA
ggtgtaccggcacctctggt

SEQ ID NO: 74 - RNA, 20 nt, synthetic construct
  misc_feature 1..20: note = Synthetic
  source 1..20: mol_type = other RNA
gtcatccacgatgaacagaa

SEQ ID NO: 75 - RNA, 20 nt, synthetic construct
  misc_feature 1..20: note = Synthetic
  source 1..20: mol_type = other RNA
ccggccccttctgttcatcg

SEQ ID NO: 76 - RNA, 20 nt, synthetic construct
  misc_feature 1..20: note = Synthetic
  source 1..20: mol_type = other RNA
tccgctttcccagtcggccg

SEQ ID NO: 77 - RNA, 20 nt, synthetic construct
  misc_feature 1..20: note = Synthetic
  source 1..20: mol_type = other RNA
aatcggcagggcgacgtcgg

SEQ ID NO: 78 - RNA, 20 nt, synthetic construct
  misc_feature 1..20: note = Synthetic
  source 1..20: mol_type = other RNA
cggaatcggcagggcgacgt

SEQ ID NO: 79 - RNA, 20 nt, synthetic construct
  misc_feature 1..20: note = Synthetic
  source 1..20: mol_type = other RNA
ggtggcgaggcgctcgctgg

SEQ ID NO: 80 - RNA, 20 nt, synthetic construct
  misc_feature 1..20: note = Synthetic
  source 1..20: mol_type = other RNA
gcgcccgagtgcgtccgaca

SEQ ID NO: 81 - RNA, 20 nt, synthetic construct
  misc_feature 1..20: note = Synthetic
  source 1..20: mol_type = other RNA
aatgcagcgagctgtgcccg

SEQ ID NO: 82 - RNA, 20 nt, synthetic construct
  misc_feature 1..20: note = Synthetic
  source 1..20: mol_type = other RNA
ccgctgtttcacttcgatgt

SEQ ID NO: 83 - RNA, 20 nt, synthetic construct
  misc_feature 1..20: note = Synthetic
  source 1..20: mol_type = other RNA
gaggagtccagtacacgatg

SEQ ID NO: 84 - RNA, 20 nt, synthetic construct
  misc_feature 1..20: note = Synthetic
  source 1..20: mol_type = other RNA
tgtaaactggcactgccggt

SEQ ID NO: 85 - RNA, 20 nt, synthetic construct
  misc_feature 1..20: note = Synthetic
  source 1..20: mol_type = other RNA
catgtggcatgttaaacacg

SEQ ID NO: 86 - RNA, 20 nt, synthetic construct
  misc_feature 1..20: note = Synthetic
  source 1..20: mol_type = other RNA
tcgtaattcagttagcctgg

SEQ ID NO: 87 - RNA, 20 nt, synthetic construct
  misc_feature 1..20: note = Synthetic
  source 1..20: mol_type = other RNA
gctggggtgtttgtacaatc

SEQ ID NO: 88 - RNA, 20 nt, synthetic construct
  misc_feature 1..20: note = Synthetic
  source 1..20: mol_type = other RNA
gggtcgtggacgacgagccc

SEQ ID NO: 89 - RNA, 20 nt, synthetic construct
  misc_feature 1..20: note = Synthetic
  source 1..20: mol_type = other RNA
cctgccgattccgccgcagg

SEQ ID NO: 90 - RNA, 20 nt, synthetic construct
  misc_feature 1..20: note = Synthetic
  source 1..20: mol_type = other RNA
agcctctgcgagggcgtgcg

SEQ ID NO: 91 - RNA, 20 nt, synthetic construct
  misc_feature 1..20: note = Synthetic
  source 1..20: mol_type = other RNA
acgttctggagcgtgaagcc

SEQ ID NO: 92 - RNA, 20 nt, synthetic construct
  misc_feature 1..20: note = Synthetic
  source 1..20: mol_type = other RNA
actcgggcgcccctccgagg

SEQ ID NO: 93 - RNA, 20 nt, synthetic construct
  misc_feature 1..20: note = Synthetic
  source 1..20: mol_type = other RNA
gcaagctgggcagcgacatg

SEQ ID NO: 94 - RNA, 20 nt, synthetic construct
  misc_feature 1..20: note = Synthetic
  source 1..20: mol_type = other RNA
ccaacatcgaagtgaaacag

SEQ ID NO: 95 - RNA, 20 nt, synthetic construct
  misc_feature 1..20: note = Synthetic
  source 1..20: mol_type = other RNA
gaatggattcccaagtacgc

SEQ ID NO: 96 - RNA, 20 nt, synthetic construct
  misc_feature 1..20: note = Synthetic
  source 1..20: mol_type = other RNA
aggagtccagtacacgatga

SEQ ID NO: 97 - RNA, 20 nt, synthetic construct
  misc_feature 1..20: note = Synthetic
  source 1..20: mol_type = other RNA
gtagacgtgcaggatccgtg

SEQ ID NO: 98 - RNA, 20 nt, synthetic construct
  misc_feature 1..20: note = Synthetic
  source 1..20: mol_type = other RNA
gtttcgcagctggcgcgcgg

SEQ ID NO: 99 - RNA, 20 nt, synthetic construct
  misc_feature 1..20: note = Synthetic
  source 1..20: mol_type = other RNA
agaaaaggggcgcgtgtacg

SEQ ID NO: 100 - RNA, 20 nt, synthetic construct
  misc_feature 1..20: note = Synthetic
  source 1..20: mol_type = other RNA
cggagccactgcttctatcg

SEQ ID NO: 101 - RNA, 20 nt, synthetic construct
  misc_feature 1..20: note = Synthetic
  source 1..20: mol_type = other RNA
tcgtctacgcgggcggccgg

SEQ ID NO: 102 - RNA, 20 nt, synthetic construct
  misc_feature 1..20: note = Synthetic
  source 1..20: mol_type = other RNA
gtaattccgtctgcgtccgg

SEQ ID NO: 103 - RNA, 20 nt, synthetic construct
  misc_feature 1..20: note = Synthetic
  source 1..20: mol_type = other RNA
ggactggtccaagagctgcg

SEQ ID NO: 104 - RNA, 20 nt, synthetic construct
  misc_feature 1..20: note = Synthetic
  source 1..20: mol_type = other RNA
cgaaacccccgcgtccacac

SEQ ID NO: 105 - RNA, 20 nt, synthetic construct
  misc_feature 1..20: note = Synthetic
  source 1..20: mol_type = other RNA
ctgcacgtctacacccgcga

SEQ ID NO: 106 - RNA, 20 nt, synthetic construct
  misc_feature 1..20: note = Synthetic
  source 1..20: mol_type = other RNA
cctggagcgagatggttcgg

SEQ ID NO: 107 - RNA, 20 nt, synthetic construct
  misc_feature 1..20: note = Synthetic
  source 1..20: mol_type = other RNA
gccatgattcaggtgaccga

SEQ ID NO: 108 - RNA, 20 nt, synthetic construct
  misc_feature 1..20: note = Synthetic
  source 1..20: mol_type = other RNA
acaacggacgctactgcaca

SEQ ID NO: 109 - RNA, 20 nt, synthetic construct
  misc_feature 1..20: note = Synthetic
  source 1..20: mol_type = other RNA
tggatgtctgtgctcgcctg

SEQ ID NO: 110 - RNA, 20 nt, synthetic construct
  misc_feature 1..20: note = Synthetic
  source 1..20: mol_type = other RNA
atggcgcggttgtatggccg

SEQ ID NO: 111 - RNA, 20 nt, synthetic construct
  misc_feature 1..20: note = Synthetic
  source 1..20: mol_type = other RNA
tggctgacgcgtccatggcg

SEQ ID NO: 112 - RNA, 20 nt, synthetic construct
  misc_feature 1..20: note = Synthetic
  source 1..20: mol_type = other RNA
aacccccgcgtccacaccgg

SEQ ID NO: 113 - RNA, 20 nt, synthetic construct
  misc_feature 1..20: note = Synthetic
  source 1..20: mol_type = other RNA
ctggagcgagatggttcggt

SEQ ID NO: 114 - RNA, 20 nt, synthetic construct
  misc_feature 1..20: note = Synthetic
  source 1..20: mol_type = other RNA
atcgaccaactctactccgg

SEQ ID NO: 115 - RNA, 20 nt, synthetic construct
  misc_feature 1..20: note = Synthetic
  source 1..20: mol_type = other RNA
catgggctactctgccacga

SEQ ID NO: 116 - RNA, 20 nt, synthetic construct
  misc_feature 1..20: note = Synthetic
  source 1..20: mol_type = other RNA
ctatagcggttggagccaca

SEQ ID NO: 117 - RNA, 20 nt, synthetic construct
  misc_feature 1..20: note = Synthetic
  source 1..20: mol_type = other RNA
acgtggtgaggattcctgaa

SEQ ID NO: 118 - RNA, 20 nt, synthetic construct
  misc_feature 1..20: note = Synthetic
  source 1..20: mol_type = other RNA
cagtaagggttacactgacg

SEQ ID NO: 119 - RNA, 20 nt, synthetic construct
  misc_feature 1..20: note = Synthetic
  source 1..20: mol_type = other RNA
acttgggagcagcgtaccat

SEQ ID NO: 120 - RNA, 20 nt, synthetic construct
  misc_feature 1..20: note = Synthetic
  source 1..20: mol_type = other RNA
gcggtggaagggacgccttg

SEQ ID NO: 121 - RNA, 20 nt, synthetic construct
  misc_feature 1..20: note = Synthetic
  source 1..20: mol_type = other RNA
tggtgtgctgtggtacgcca

SEQ ID NO: 122 - RNA, 20 nt, synthetic construct
  misc_feature 1..20: note = Synthetic
  source 1..20: mol_type = other RNA
tggcatcgtaggtctgtcct

SEQ ID NO: 123 - RNA, 20 nt, synthetic construct
  misc_feature 1..20: note = Synthetic
  source 1..20: mol_type = other RNA
ccggccatacaaccgcgcca

SEQ ID NO: 124 - RNA, 20 nt, synthetic construct
  misc_feature 1..20: note = Synthetic
  source 1..20: mol_type = other RNA
tccgctctctcgcccgctgg

SEQ ID NO: 125 - RNA, 20 nt, synthetic construct
  misc_feature 1..20: note = Synthetic
  source 1..20: mol_type = other RNA
ccggcgcacagcaacccgag

SEQ ID NO: 126 - RNA, 20 nt, synthetic construct
  misc_feature 1..20: note = Synthetic
  source 1..20: mol_type = other RNA
tgtacggggatgggtccgca

SEQ ID NO: 127 - RNA, 20 nt, synthetic construct
  misc_feature 1..20: note = Synthetic
  source 1..20: mol_type = other RNA
agtaattccgtctgcgtccg

SEQ ID NO: 128 - RNA, 20 nt, synthetic construct
  misc_feature 1..20: note = Synthetic
  source 1..20: mol_type = other RNA
gtactccgtgtgtcccggca

SEQ ID NO: 129 - RNA, 20 nt, synthetic construct
  misc_feature 1..20: note = Synthetic
  source 1..20: mol_type = other RNA
tctggtggctgacgcgtcca

SEQ ID NO: 130 - RNA, 20 nt, synthetic construct
  misc_feature 1..20: note = Synthetic
  source 1..20: mol_type = other RNA
ccagtgctgcgcgtccgctc

SEQ ID NO: 131 - RNA, 20 nt, synthetic construct
  misc_feature 1..20: note = Synthetic
  source 1..20: mol_type = other RNA
gtgcgccggagcatgctcgt

SEQ ID NO: 132 - RNA, 20 nt, synthetic construct
  misc_feature 1..20: note = Synthetic
  source 1..20: mol_type = other RNA
atgctcgtgggcctccggtg

SEQ ID NO: 133 - RNA, 20 nt, synthetic construct
  misc_feature 1..20: note = Synthetic
  source 1..20: mol_type = other RNA
gaagaaaaggggcgcgtgta

SEQ ID NO: 134 - RNA, 20 nt, synthetic construct
  misc_feature 1..20: note = Synthetic
  source 1..20: mol_type = other RNA
accctaaagccactgctgcg

SEQ ID NO: 135 - RNA, 20 nt, synthetic construct
  misc_feature 1..20: note = Synthetic
  source 1..20: mol_type = other RNA
ggctacctcgtctacgcggg

SEQ ID NO: 136 - RNA, 20 nt, synthetic construct
  misc_feature 1..20: note = Synthetic
  source 1..20: mol_type = other RNA
ggtgggctacctcgtctacg

SEQ ID NO: 137 - RNA, 20 nt, synthetic construct
  misc_feature 1..20: note = Synthetic
  source 1..20: mol_type = other RNA
ctactccggcggcggcaagg

SEQ ID NO: 138 - RNA, 20 nt, synthetic construct
  misc_feature 1..20: note = Synthetic
  source 1..20: mol_type = other RNA
actatagcggttggagccac

SEQ ID NO: 139 - RNA, 20 nt, synthetic construct
  misc_feature 1..20: note = Synthetic
  source 1..20: mol_type = other RNA
cttgggagcagcgtaccatt

SEQ ID NO: 140 - RNA, 20 nt, synthetic construct
  misc_feature 1..20: note = Synthetic
  source 1..20: mol_type = other RNA
gggagcagcgtaccattggg

SEQ ID NO: 141 - RNA, 20 nt, synthetic construct
  misc_feature 1..20: note = Synthetic
  source 1..20: mol_type = other RNA
aacaacggacgctactgcac

SEQ ID NO: 142 - RNA, 20 nt, synthetic construct
  misc_feature 1..20: note = Synthetic
  source 1..20: mol_type = other RNA
acgtcaagccatggcaactg

SEQ ID NO: 143 - RNA, 20 nt, synthetic construct
  misc_feature 1..20: note = Synthetic
  source 1..20: mol_type = other RNA
ctatttcagacgtcaagcca

SEQ ID NO: 144 - RNA, 20 nt, synthetic construct
  misc_feature 1..20: note = Synthetic
  source 1..20: mol_type = other RNA
agtactcaggcccgaatgtc

SEQ ID NO: 145 - RNA, 20 nt, synthetic construct
  misc_feature 1..20: note = Synthetic
  source 1..20: mol_type = other RNA
cgacgcgacatccaaccgag

SEQ ID NO: 146 - RNA, 20 nt, synthetic construct
  misc_feature 1..20: note = Synthetic
  source 1..20: mol_type = other RNA
cgctcggttggatgtcgcgt

SEQ ID NO: 147 - RNA, 20 nt, synthetic construct
  misc_feature 1..20: note = Synthetic
  source 1..20: mol_type = other RNA
tcacgtcagcgagcccggtg

SEQ ID NO: 148 - RNA, 20 nt, synthetic construct
  misc_feature 1..20: note = Synthetic
  source 1..20: mol_type = other RNA
gcgcttgactcggatgcggg

SEQ ID NO: 149 - RNA, 20 nt, synthetic construct
  misc_feature 1..20: note = Synthetic
  source 1..20: mol_type = other RNA
ctgccgcttcgggacgtgca

SEQ ID NO: 150 - RNA, 20 nt, synthetic construct
  misc_feature 1..20: note = Synthetic
  source 1..20: mol_type = other RNA
cttcacgtcagcgagcccgg

SEQ ID NO: 151 - RNA, 20 nt, synthetic construct
  misc_feature 1..20: note = Synthetic
  source 1..20: mol_type = other RNA
gtagcgcttgactcggatgc

SEQ ID NO: 152 - RNA, 20 nt, synthetic construct
  misc_feature 1..20: note = Synthetic
  source 1..20: mol_type = other RNA
gcaccgtgcacgtcccgaag

SEQ ID NO: 153 - RNA, 20 nt, synthetic construct
  misc_feature 1..20: note = Synthetic
  source 1..20: mol_type = other RNA
ctaggaaggcgagcgaaccc

SEQ ID NO: 154 - RNA, 20 nt, synthetic construct
  misc_feature 1..20: note = Synthetic
  source 1..20: mol_type = other RNA
acaaggacaacgtcgccccc

SEQ ID NO: 155 - RNA, 20 nt, synthetic construct
  misc_feature 1..20: note = Synthetic
  source 1..20: mol_type = other RNA
tggggagcacttccactcgg

SEQ ID NO: 156 - RNA, 20 nt, synthetic construct
  misc_feature 1..20: note = Synthetic
  source 1..20: mol_type = other RNA
agcggtgtcagcgcctagga

SEQ ID NO: 157 - RNA, 20 nt, synthetic construct
  misc_feature 1..20: note = Synthetic
  source 1..20: mol_type = other RNA
attcggccccaggacatgaa

SEQ ID NO: 158 - RNA, 20 nt, synthetic construct
  misc_feature 1..20: note = Synthetic
  source 1..20: mol_type = other RNA
cctgtcttcggggcttcgag

SEQ ID NO: 159 - RNA, 20 nt, synthetic construct
  misc_feature 1..20: note = Synthetic
  source 1..20: mol_type = other RNA
gtggggagcacttccactcg

SEQ ID NO: 160 - RNA, 20 nt, synthetic construct
  misc_feature 1..20: note = Synthetic
  source 1..20: mol_type = other RNA
gagcgaacccaggtacatca

SEQ ID NO: 161 - RNA, 20 nt, synthetic construct
  misc_feature 1..20: note = Synthetic
  source 1..20: mol_type = other RNA
tcctaggcgctgacaccgct

SEQ ID NO: 162 - RNA, 20 nt, synthetic construct
  misc_feature 1..20: note = Synthetic
  source 1..20: mol_type = other RNA
aggcgctgacaccgctcggt

SEQ ID NO: 163 - RNA, 20 nt, synthetic construct
  misc_feature 1..20: note = Synthetic
  source 1..20: mol_type = other RNA
caccgggctcgctgacgtga

SEQ ID NO: 164 - RNA, 20 nt, synthetic construct
  misc_feature 1..20: note = Synthetic
  source 1..20: mol_type = other RNA
ggtagcgcttgactcggatg

SEQ ID NO: 165 - RNA, 20 nt, synthetic construct
  misc_feature 1..20: note = Synthetic
  source 1..20: mol_type = other RNA
agggcgtagttacctgtctt

SEQ ID NO: 166 - RNA, 20 nt, synthetic construct
  misc_feature 1..20: note = Synthetic
  source 1..20: mol_type = other RNA
cgccggcggccgtagccctg

SEQ ID NO: 167 - RNA, 20 nt, synthetic construct
  misc_feature 1..20: note = Synthetic
  source 1..20: mol_type = other RNA
tccgtcgccctgatgtacct

SEQ ID NO: 168 - RNA, 20 nt, synthetic construct
  misc_feature 1..20: note = Synthetic
  source 1..20: mol_type = other RNA
ttcacgtcagcgagcccggt

SEQ ID NO: 169 - RNA, 20 nt, synthetic construct
  misc_feature 1..20: note = Synthetic
  source 1..20: mol_type = other RNA
ggcgtagttacctgtcttcg

SEQ ID NO: 170 - RNA, 20 nt, synthetic construct
  misc_feature 1..20: note = Synthetic
  source 1..20: mol_type = other RNA
catccggactgctgcgggcg

SEQ ID NO: 171 - RNA, 20 nt, synthetic construct
  misc_feature 1..20: note = Synthetic
  source 1..20: mol_type = other RNA
tctggcggtagcgcttgact

SEQ ID NO: 172 - RNA, 20 nt, synthetic construct
  misc_feature 1..20: note = Synthetic
  source 1..20: mol_type = other RNA
accgagcggtgtcagcgcct

SEQ ID NO: 173 - RNA, 20 nt, synthetic construct
  misc_feature 1..20: note = Synthetic
  source 1..20: mol_type = other RNA
cctggggccgaataagggtc

SEQ ID NO: 174 - RNA, 20 nt, synthetic construct
  misc_feature 1..20: note = Synthetic
  source 1..20: mol_type = other RNA
ccagacccttattcggcccc

SEQ ID NO: 175 - RNA, 20 nt, synthetic construct
  misc_feature 1..20: note = Synthetic
  source 1..20: mol_type = other RNA
tattcggccccaggacatga

SEQ ID NO: 176 - RNA, 20 nt, synthetic construct
  misc_feature 1..20: note = Synthetic
  source 1..20: mol_type = other RNA
gcgccggcggccgtagccct

SEQ ID NO: 177 - RNA, 20 nt, synthetic construct
  misc_feature 1..20: note = Synthetic
  source 1..20: mol_type = other RNA
ttctaagccacaagcacacg

SEQ ID NO: 178 - RNA, 20 nt, synthetic construct
  misc_feature 1..20: note = Synthetic
  source 1..20: mol_type = other RNA
gggagcacttccactcgggg

SEQ ID NO: 179 - RNA, 20 nt, synthetic construct
  misc_feature 1..20: note = Synthetic
  source 1..20: mol_type = other RNA
acccaggtacatcagggcga

SEQ ID NO: 180 - RNA, 20 nt, synthetic construct
  misc_feature 1..20: note = Synthetic
  source 1..20: mol_type = other RNA
ataagtgggctctgagtcgt

SEQ ID NO: 181 - RNA, 20 nt, synthetic construct
  misc_feature 1..20: note = Synthetic
  source 1..20: mol_type = other RNA
ctggggccgaataagggtct

SEQ ID NO: 182 - RNA, 20 nt, synthetic construct
  misc_feature 1..20: note = Synthetic
  source 1..20: mol_type = other RNA
atccggactgctgcgggcgg

SEQ ID NO: 183 - RNA, 20 nt, synthetic construct
  misc_feature 1..20: note = Synthetic
  source 1..20: mol_type = other RNA
actcggatgcgggcggcatc

SEQ ID NO: 184 - RNA, 20 nt, synthetic construct
  misc_feature 1..20: note = Synthetic
  source 1..20: mol_type = other RNA
agcggcagccaaagctccgg

SEQ ID NO: 185 - RNA, 20 nt, synthetic construct
  misc_feature 1..20: note = Synthetic
  source 1..20: mol_type = other RNA
ggccttcacgtcagcgagcc

SEQ ID NO: 186 - RNA, 20 nt, synthetic construct
  misc_feature 1..20: note = Synthetic
  source 1..20: mol_type = other RNA
tcatgtcctggggccgaata

SEQ ID NO: 187 - RNA, 20 nt, synthetic construct
  misc_feature 1..20: note = Synthetic
  source 1..20: mol_type = other RNA
caccagagtccgacccgggc

SEQ ID NO: 188 - RNA, 20 nt, synthetic construct
  misc_feature 1..20: note = Synthetic
  source 1..20: mol_type = other RNA
agtggggagcacttccactc

SEQ ID NO: 189 - RNA, 20 nt, synthetic construct
  misc_feature 1..20: note = Synthetic
  source 1..20: mol_type = other RNA
ttccgtcgccctgatgtacc

SEQ ID NO: 190 - RNA, 20 nt, synthetic construct
  misc_feature 1..20: note = Synthetic
  source 1..20: mol_type = other RNA
cagagcccacttattccacc

SEQ ID NO: 191 - RNA, 20 nt, synthetic construct
  misc_feature 1..20: note = Synthetic
  source 1..20: mol_type = other RNA
aataagtgggctctgagtcg

SEQ ID NO: 192 - RNA, 20 nt, synthetic construct
  misc_feature 1..20: note = Synthetic
  source 1..20: mol_type = other RNA
catgtcctggggccgaataa

SEQ ID NO: 193 - RNA, 20 nt, synthetic construct
  misc_feature 1..20: note = Synthetic
  source 1..20: mol_type = other RNA
gctgtgctgtggttccgtga

SEQ ID NO: 194 - RNA, 20 nt, synthetic construct
  misc_feature 1..20: note = Synthetic
  source 1..20: mol_type = other RNA
caggaacggccgcccgtgga

SEQ ID NO: 195 - RNA, 20 nt, synthetic construct
  misc_feature 1..20: note = Synthetic
  source 1..20: mol_type = other RNA
gcggccgttcctgatgccgt

SEQ ID NO: 196 - RNA, 20 nt, synthetic construct
  misc_feature 1..20: note = Synthetic
  source 1..20: mol_type = other RNA
gccaaggcctgcgtagtaca

SEQ ID NO: 197 - RNA, 20 nt, synthetic construct
  misc_feature 1..20: note = Synthetic
  source 1..20: mol_type = other RNA
tacctaggactcgttctccg

SEQ ID NO: 198 - RNA, 20 nt, synthetic construct
  misc_feature 1..20: note = Synthetic
  source 1..20: mol_type = other RNA
gcatcaggaacggccgcccg

SEQ ID NO: 199 - RNA, 20 nt, synthetic construct
  misc_feature 1..20: note = Synthetic
  source 1..20: mol_type = other RNA
gtagacaacaataccacgtg

SEQ ID NO: 200 - RNA, 20 nt, synthetic construct
  misc_feature 1..20: note = Synthetic
  source 1..20: mol_type = other RNA
tatcatcgtagccaatgtgc

SEQ ID NO: 201 - RNA, 20 nt, synthetic construct
  misc_feature 1..20: note = Synthetic
  source 1..20: mol_type = other RNA
atcgtagccaatgtgccgga

SEQ ID NO: 202 - RNA, 20 nt, synthetic construct
  misc_feature 1..20: note = Synthetic
  source 1..20: mol_type = other RNA
ggtcatcccagtccactcgg

SEQ ID NO: 203 - RNA, 20 nt, synthetic construct
  misc_feature 1..20: note = Synthetic
  source 1..20: mol_type = other RNA
tgaccgctggatcaacgatg

SEQ ID NO: 204 - RNA, 20 nt, synthetic construct
  misc_feature 1..20: note = Synthetic
  source 1..20: mol_type = other RNA
atcatcaggcgacgccctgg

SEQ ID NO: 205 - RNA, 20 nt, synthetic construct
  misc_feature 1..20: note = Synthetic
  source 1..20: mol_type = other RNA
tctttttaaggcaccgcacg

SEQ ID NO: 206 - RNA, 20 nt, synthetic construct
  misc_feature 1..20: note = Synthetic
  source 1..20: mol_type = other RNA
agcacttcgacatttgccca

SEQ ID NO: 207 - RNA, 20 nt, synthetic construct
  misc_feature 1..20: note = Synthetic
  source 1..20: mol_type = other RNA
cgttgggaccatctcgcgcc

SEQ ID NO: 208 - RNA, 20 nt, synthetic construct
  misc_feature 1..20: note = Synthetic
  source 1..20: mol_type = other RNA
ttctgattcaccagtgagcg

SEQ ID NO: 209 - RNA, 20 nt, synthetic construct
  misc_feature 1..20: note = Synthetic
  source 1..20: mol_type = other RNA
gtggataactcctcgctcac

SEQ ID NO: 210 - RNA, 20 nt, synthetic construct
  misc_feature 1..20: note = Synthetic
  source 1..20: mol_type = other RNA
cagcaaaccttccggcacat

SEQ ID NO: 211 - RNA, 20 nt, synthetic construct
  misc_feature 1..20: note = Synthetic
  source 1..20: mol_type = other RNA
cgcccgtggagggtcaatca

SEQ ID NO: 212 - RNA, 20 nt, synthetic construct
  misc_feature 1..20: note = Synthetic
  source 1..20: mol_type = other RNA
tcaggaacggccgcccgtgg

SEQ ID NO: 213 - RNA, 20 nt, synthetic construct
  misc_feature 1..20: note = Synthetic
  source 1..20: mol_type = other RNA
catgattgaccctccacggg

SEQ ID NO: 214 - RNA, 20 nt, synthetic construct
  misc_feature 1..20: note = Synthetic
  source 1..20: mol_type = other RNA
caaacattccactaccactg

SEQ ID NO: 215 - RNA, 20 nt, synthetic construct
  misc_feature 1..20: note = Synthetic
  source 1..20: mol_type = other RNA
gaatgagcggctgatcagca

SEQ ID NO: 216 - RNA, 20 nt, synthetic construct
  misc_feature 1..20: note = Synthetic
  source 1..20: mol_type = other RNA
gctgagatcctggcgcgaga

SEQ ID NO: 217 - RNA, 20 nt, synthetic construct
  misc_feature 1..20: note = Synthetic
  source 1..20: mol_type = other RNA
gtggtattgttgtctacact

SEQ ID NO: 218 - RNA, 20 nt, synthetic construct
  misc_feature 1..20: note = Synthetic
  source 1..20: mol_type = other RNA
gacacttactgccaaacgca

SEQ ID NO: 219 - RNA, 20 nt, synthetic construct
  misc_feature 1..20: note = Synthetic
  source 1..20: mol_type = other RNA
tgttggggctccgatgtgtt

SEQ ID NO: 220 - RNA, 20 nt, synthetic construct
  misc_feature 1..20: note = Synthetic
  source 1..20: mol_type = other RNA
caccacgatactgacgaaga

SEQ ID NO: 221 - RNA, 20 nt, synthetic construct
  misc_feature 1..20: note = Synthetic
  source 1..20: mol_type = other RNA
agaggatcaacttacttgag

SEQ ID NO: 222 - RNA, 20 nt, synthetic construct
  misc_feature 1..20: note = Synthetic
  source 1..20: mol_type = other RNA
aatgcccataattaccgcca

SEQ ID NO: 223 - RNA, 20 nt, synthetic construct
  misc_feature 1..20: note = Synthetic
  source 1..20: mol_type = other RNA
ctcatcatcaggcgacgccc

SEQ ID NO: 224 - RNA, 20 nt, synthetic construct
  misc_feature 1..20: note = Synthetic
  source 1..20: mol_type = other RNA
gacaaagcgtctggtacctg

SEQ ID NO: 225 - RNA, 20 nt, synthetic construct
  misc_feature 1..20: note = Synthetic
  source 1..20: mol_type = other RNA
tatccacatcatcacgggtg

SEQ ID NO: 226 - RNA, 20 nt, synthetic construct
  misc_feature 1..20: note = Synthetic
  source 1..20: mol_type = other RNA
tgatgaagggcgccccagaa

SEQ ID NO: 227 - RNA, 20 nt, synthetic construct
  misc_feature 1..20: note = Synthetic
  source 1..20: mol_type = other RNA
tctggggtagggtgctatcg

SEQ ID NO: 228 - RNA, 20 nt, synthetic construct
  misc_feature 1..20: note = Synthetic
  source 1..20: mol_type = other RNA
tcacctgttgggcctccgag

SEQ ID NO: 229 - RNA, 20 nt, synthetic construct
  misc_feature 1..20: note = Synthetic
  source 1..20: mol_type = other RNA
acgatgtggaagacagctac

SEQ ID NO: 230 - RNA, 20 nt, synthetic construct
  misc_feature 1..20: note = Synthetic
  source 1..20: mol_type = other RNA
cagaggatcaacttacttga

SEQ ID NO: 231 - RNA, 20 nt, synthetic construct
  misc_feature 1..20: note = Synthetic
  source 1..20: mol_type = other RNA
ctccaaataggcgttctgaa

SEQ ID NO: 232 - RNA, 20 nt, synthetic construct
  misc_feature 1..20: note = Synthetic
  source 1..20: mol_type = other RNA
atcactgccgtgtactacgc

SEQ ID NO: 233 - RNA, 20 nt, synthetic construct
  misc_feature 1..20: note = Synthetic
  source 1..20: mol_type = other RNA
ctctactccagtcacaattg

SEQ ID NO: 234 - RNA, 20 nt, synthetic construct
  misc_feature 1..20: note = Synthetic
  source 1..20: mol_type = other RNA
gagtggactgggatgaccgc

SEQ ID NO: 235 - RNA, 20 nt, synthetic construct
  misc_feature 1..20: note = Synthetic
  source 1..20: mol_type = other RNA
ccagaggatcaacttacttg

SEQ ID NO: 236 - RNA, 20 nt, synthetic construct
  misc_feature 1..20: note = Synthetic
  source 1..20: mol_type = other RNA
gaatgcccataattaccgcc

SEQ ID NO: 237 - RNA, 20 nt, synthetic construct
  misc_feature 1..20: note = Synthetic
  source 1..20: mol_type = other RNA
ctcaccatttcgaatcacaa

SEQ ID NO: 238 - RNA, 20 nt, synthetic construct
  misc_feature 1..20: note = Synthetic
  source 1..20: mol_type = other RNA
aggcaatgttcctcgtctcc

SEQ ID NO: 239 - RNA, 20 nt, synthetic construct
  misc_feature 1..20: note = Synthetic
  source 1..20: mol_type = other RNA
cgtggtattgttgtctacac

SEQ ID NO: 240 - RNA, 20 nt, synthetic construct
  misc_feature 1..20: note = Synthetic
  source 1..20: mol_type = other RNA
cctcaagccaggtgtactca

SEQ ID NO: 241 - RNA, 20 nt, synthetic construct
  misc_feature 1..20: note = Synthetic
  source 1..20: mol_type = other RNA
gaactacccagtcgtacgtg

SEQ ID NO: 242 - RNA, 20 nt, synthetic construct
  misc_feature 1..20: note = Synthetic
  source 1..20: mol_type = other RNA
acacgctcagctcccctcgg

SEQ ID NO: 243 - RNA, 20 nt, synthetic construct
  misc_feature 1..20: note = Synthetic
  source 1..20: mol_type = other RNA
aactacccagtcgtacgtgc

SEQ ID NO: 244 - RNA, 20 nt, synthetic construct
  misc_feature 1..20: note = Synthetic
  source 1..20: mol_type = other RNA
tattagtgagtgggtaacgg

SEQ ID NO: 245 - RNA, 20 nt, synthetic construct
  misc_feature 1..20: note = Synthetic
  source 1..20: mol_type = other RNA
tcatgccatacagaagcgtg

SEQ ID NO: 246 - RNA, 20 nt, synthetic construct
  misc_feature 1..20: note = Synthetic
  source 1..20: mol_type = other RNA
ggtagacgccaaaacatgtg

SEQ ID NO: 247 - RNA, 20 nt, synthetic construct
  misc_feature 1..20: note = Synthetic
  source 1..20: mol_type = other RNA
aagggcccgcacgtacgact

SEQ ID NO: 248 - RNA, 20 nt, synthetic construct
  misc_feature 1..20: note = Synthetic
  source 1..20: mol_type = other RNA
acgactgggtagttcggcac

SEQ ID NO: 249 - RNA, 20 nt, synthetic construct
  misc_feature 1..20: note = Synthetic
  source 1..20: mol_type = other RNA
cgactgggtagttcggcact

SEQ ID NO: 250 - RNA, 20 nt, synthetic construct
  misc_feature 1..20: note = Synthetic
  source 1..20: mol_type = other RNA
ctctgaccctgcccgccgag

SEQ ID NO: 251 - RNA, 20 nt, synthetic construct
  misc_feature 1..20: note = Synthetic
  source 1..20: mol_type = other RNA
agagtggcgccggaccctca

SEQ ID NO: 252 - RNA, 20 nt, synthetic construct
  misc_feature 1..20: note = Synthetic
  source 1..20: mol_type = other RNA
tcccatgggtccgcacacct

SEQ ID NO: 253 - RNA, 20 nt, synthetic construct
  misc_feature 1..20: note = Synthetic
  source 1..20: mol_type = other RNA
tctacccacacgcttctgta

SEQ ID NO: 254 - RNA, 20 nt, synthetic construct
  misc_feature 1..20: note = Synthetic
  source 1..20: mol_type = other RNA
gtacgtgcgggcccttacca

SEQ ID NO: 255 - RNA, 20 nt, synthetic construct
  misc_feature 1..20: note = Synthetic
  source 1..20: mol_type = other RNA
agtggacatgtcgggcggga

SEQ ID NO: 256 - RNA, 20 nt, synthetic construct
  misc_feature 1..20: note = Synthetic
  source 1..20: mol_type = other RNA
ttgactactgagcatcaccc

SEQ ID NO: 257 - RNA, 20 nt, synthetic construct
  misc_feature 1..20: note = Synthetic
  source 1..20: mol_type = other RNA
tgtgtacctccacgtttcag

SEQ ID NO: 258 - RNA, 20 nt, synthetic construct
  misc_feature 1..20: note = Synthetic
  source 1..20: mol_type = other RNA
cgagaccaagtgcaatccca

SEQ ID NO: 259 - RNA, 20 nt, synthetic construct
  misc_feature 1..20: note = Synthetic
  source 1..20: mol_type = other RNA
actgcagtggacatgtcggg

SEQ ID NO: 260 - RNA, 20 nt, synthetic construct
  misc_feature 1..20: note = Synthetic
  source 1..20: mol_type = other RNA
actctgaccctgcccgccga

SEQ ID NO: 261 - RNA, 20 nt, synthetic construct
  misc_feature 1..20: note = Synthetic
  source 1..20: mol_type = other RNA
acgcagacttgtacacgtcc

SEQ ID NO: 262 - RNA, 20 nt, synthetic construct
  misc_feature 1..20: note = Synthetic
  source 1..20: mol_type = other RNA
gggactctggagagcgtgaa

SEQ ID NO: 263 - RNA, 20 nt, synthetic construct
  misc_feature 1..20: note = Synthetic
  source 1..20: mol_type = other RNA
acccaggtgtgcggacccat

SEQ ID NO: 264 - RNA, 20 nt, synthetic construct
  misc_feature 1..20: note = Synthetic
  source 1..20: mol_type = other RNA
tgttaaattccactgaaacg

SEQ ID NO: 265 - RNA, 20 nt, synthetic construct
  misc_feature 1..20: note = Synthetic
  source 1..20: mol_type = other RNA
catgccatacagaagcgtgt

SEQ ID NO: 266 - RNA, 20 nt, synthetic construct
  misc_feature 1..20: note = Synthetic
  source 1..20: mol_type = other RNA
taagggcccgcacgtacgac

SEQ ID NO: 267 - RNA, 20 nt, synthetic construct
  misc_feature 1..20: note = Synthetic
  source 1..20: mol_type = other RNA
gaattggctggcgattcata

SEQ ID NO: 268 - RNA, 20 nt, synthetic construct
  misc_feature 1..20: note = Synthetic
  source 1..20: mol_type = other RNA
ctgcagtggacatgtcgggc

SEQ ID NO: 269 - RNA, 20 nt, synthetic construct
  misc_feature 1..20: note = Synthetic
  source 1..20: mol_type = other RNA
atgggtccgcacacctgggt

SEQ ID NO: 270 - RNA, 20 nt, synthetic construct
  misc_feature 1..20: note = Synthetic
  source 1..20: mol_type = other RNA
gcacgtacgactgggtagtt

SEQ ID NO: 271 - RNA, 20 nt, synthetic construct
  misc_feature 1..20: note = Synthetic
  source 1..20: mol_type = other RNA
gtcccatgggtccgcacacc

SEQ ID NO: 272 - RNA, 20 nt, synthetic construct
  misc_feature 1..20: note = Synthetic
  source 1..20: mol_type = other RNA
ggattaaccttgtgcactca

SEQ ID NO: 273 - RNA, 20 nt, synthetic construct
  misc_feature 1..20: note = Synthetic
  source 1..20: mol_type = other RNA
tacccaggtgtgcggaccca

SEQ ID NO: 274 - RNA, 20 nt, synthetic construct
  misc_feature 1..20: note = Synthetic
  source 1..20: mol_type = other RNA
gtaacccatgggattgcact

SEQ ID NO: 275 - RNA, 20 nt, synthetic construct
  misc_feature 1..20: note = Synthetic
  source 1..20: mol_type = other RNA
ggactctggagagcgtgaat

SEQ ID NO: 276 - RNA, 20 nt, synthetic construct
  misc_feature 1..20: note = Synthetic
  source 1..20: mol_type = other RNA
gaagcaaacatccgaggaca

SEQ ID NO: 277 - RNA, 20 nt, synthetic construct
  misc_feature 1..20: note = Synthetic
  source 1..20: mol_type = other RNA
acacgtgatagaagagctgt

SEQ ID NO: 278 - RNA, 20 nt, synthetic construct
  misc_feature 1..20: note = Synthetic
  source 1..20: mol_type = other RNA
cacgctctccagagtcccat

SEQ ID NO: 279 - RNA, 20 nt, synthetic construct
  misc_feature 1..20: note = Synthetic
  source 1..20: mol_type = other RNA
gctcagtagtcaagtgcctt

SEQ ID NO: 280 - RNA, 20 nt, synthetic construct
  misc_feature 1..20: note = Synthetic
  source 1..20: mol_type = other RNA
tgtgcggacccatgggactc

SEQ ID NO: 281 - RNA, 20 nt, synthetic construct
  misc_feature 1..20: note = Synthetic
  source 1..20: mol_type = other RNA
cttcattgggccgaactttc

SEQ ID NO: 282 - RNA, 20 nt, synthetic construct
  misc_feature 1..20: note = Synthetic
  source 1..20: mol_type = other RNA
taccgcaccgcttagatctg

SEQ ID NO: 283 - RNA, 20 nt, synthetic construct
  misc_feature 1..20: note = Synthetic
  source 1..20: mol_type = other RNA
ccaaccccaattgcagtttg

SEQ ID NO: 284 - RNA, 20 nt, synthetic construct
  misc_feature 1..20: note = Synthetic
  source 1..20: mol_type = other RNA
catgctgggcacatacacgc

SEQ ID NO: 285 - RNA, 20 nt, synthetic construct
  misc_feature 1..20: note = Synthetic
  source 1..20: mol_type = other RNA
ttctggggcatgctaacatg

SEQ ID NO: 286 - RNA, 20 nt, synthetic construct
  misc_feature 1..20: note = Synthetic
  source 1..20: mol_type = other RNA
ttaccgcaccgcttagatct

SEQ ID NO: 287 - RNA, 20 nt, synthetic construct
  misc_feature 1..20: note = Synthetic
  source 1..20: mol_type = other RNA
aatctgagtacttgcatgct

SEQ ID NO: 288 - RNA, 20 nt, synthetic construct
  misc_feature 1..20: note = Synthetic
  source 1..20: mol_type = other RNA
agccccagatctaagcggtg

SEQ ID NO: 289 - RNA, 20 nt, synthetic construct
  misc_feature 1..20: note = Synthetic
  source 1..20: mol_type = other RNA
cgcttcgtcctcactgagcg

SEQ ID NO: 290 - RNA, 20 nt, synthetic construct
  misc_feature 1..20: note = Synthetic
  source 1..20: mol_type = other RNA
gcatgctaacatgagggcga

SEQ ID NO: 291 - RNA, 20 nt, synthetic construct
  misc_feature 1..20: note = Synthetic
  source 1..20: mol_type = other RNA
aagggatatgtccagcgact

SEQ ID NO: 292 - RNA, 20 nt, synthetic construct
  misc_feature 1..20: note = Synthetic
  source 1..20: mol_type = other RNA
atggtctctctccaagtcgc

SEQ ID NO: 293 - RNA, 20 nt, synthetic construct
  misc_feature 1..20: note = Synthetic
  source 1..20: mol_type = other RNA
gttcccccaaactgcaattg

SEQ ID NO: 294 - RNA, 20 nt, synthetic construct
  misc_feature 1..20: note = Synthetic
  source 1..20: mol_type = other RNA
taatctgagtacttgcatgc

SEQ ID NO: 295 - RNA, 20 nt, synthetic construct
  misc_feature 1..20: note = Synthetic
  source 1..20: mol_type = other RNA
tcgtcctcactgagcgtggc

SEQ ID NO: 296 - RNA, 20 nt, synthetic construct
  misc_feature 1..20: note = Synthetic
  source 1..20: mol_type = other RNA
ggacgaagcgcgcctcctgc

SEQ ID NO: 297 - RNA, 20 nt, synthetic construct
  misc_feature 1..20: note = Synthetic
  source 1..20: mol_type = other RNA
cgtcctcactgagcgtggcc

SEQ ID NO: 298 - RNA, 20 nt, synthetic construct
  misc_feature 1..20: note = Synthetic
  source 1..20: mol_type = other RNA
attaccgcaccgcttagatc

SEQ ID NO: 299 - RNA, 20 nt, synthetic construct
  misc_feature 1..20: note = Synthetic
  source 1..20: mol_type = other RNA
ctccaaccccaattgcagtt

SEQ ID NO: 300 - RNA, 20 nt, synthetic construct
  misc_feature 1..20: note = Synthetic
  source 1..20: mol_type = other RNA
cgttcccccaaactgcaatt

SEQ ID NO: 301 - RNA, 20 nt, synthetic construct
  misc_feature 1..20: note = Synthetic
  source 1..20: mol_type = other RNA
ccccaaactgcaattggggt

SEQ ID NO: 302 - RNA, 20 nt, synthetic construct
  misc_feature 1..20: note = Synthetic
  source 1..20: mol_type = other RNA
cgcgtcctctttactgagtg

SEQ ID NO: 303 - RNA, 20 nt, synthetic construct
  misc_feature 1..20: note = Synthetic
  source 1..20: mol_type = other RNA
tatcttggtcctgtaccagg

SEQ ID NO: 304 - RNA, 20 nt, synthetic construct
  misc_feature 1..20: note = Synthetic
  source 1..20: mol_type = other RNA
acctgaatggcgccgcctgg

SEQ ID NO: 305 - RNA, 20 nt, synthetic construct
  misc_feature 1..20: note = Synthetic
  source 1..20: mol_type = other RNA
tattggctggacctacctga

SEQ ID NO: 306 - RNA, 20 nt, synthetic construct
  misc_feature 1..20: note = Synthetic
  source 1..20: mol_type = other RNA
cccggccacactcagtaaag

SEQ ID NO: 307 - RNA, 20 nt, synthetic construct
  misc_feature 1..20: note = Synthetic
  source 1..20: mol_type = other RNA
cctttacagagaggcggcat

SEQ ID NO: 308 - RNA, 20 nt, synthetic construct
  misc_feature 1..20: note = Synthetic
  source 1..20: mol_type = other RNA
cagccgatgagtcacacagg

SEQ ID NO: 309 - RNA, 20 nt, synthetic construct
  misc_feature 1..20: note = Synthetic
  source 1..20: mol_type = other RNA
aaagaggctaaccttcaggt

SEQ ID NO: 310 - RNA, 20 nt, synthetic construct
  misc_feature 1..20: note = Synthetic
  source 1..20: mol_type = other RNA
cagtatcttggtcctgtacc

SEQ ID NO: 311 - RNA, 20 nt, synthetic construct
  misc_feature 1..20: note = Synthetic
  source 1..20: mol_type = other RNA
atcttggtcctgtaccaggc

SEQ ID NO: 312 - RNA, 20 nt, synthetic construct
  misc_feature 1..20: note = Synthetic
  source 1..20: mol_type = other RNA
tgccagccgatgagtcacac

SEQ ID NO: 313 - RNA, 20 nt, synthetic construct
  misc_feature 1..20: note = Synthetic
  source 1..20: mol_type = other RNA
aggcttgctgagcagatcag

SEQ ID NO: 314 - RNA, 20 nt, synthetic construct
  misc_feature 1..20: note = Synthetic
  source 1..20: mol_type = other RNA
atccttcctttacagagagg

SEQ ID NO: 315 - RNA, 20 nt, synthetic construct
  misc_feature 1..20: note = Synthetic
  source 1..20: mol_type = other RNA
agaggacgcgcgcctcctgc

SEQ ID NO: 316 - RNA, 20 nt, synthetic construct
  misc_feature 1..20: note = Synthetic
  source 1..20: mol_type = other RNA
gctttggaacccacattggt

SEQ ID NO: 317 - RNA, 20 nt, synthetic construct
  misc_feature 1..20: note = Synthetic
  source 1..20: mol_type = other RNA
caacttcgtgcccaccaatg

SEQ ID NO: 318 - RNA, 20 nt, synthetic construct
  misc_feature 1..20: note = Synthetic
  source 1..20: mol_type = other RNA
gtccctgcggcgcctgccaa

SEQ ID NO: 319 - RNA, 20 nt, synthetic construct
  misc_feature 1..20: note = Synthetic
  source 1..20: mol_type = other RNA
gtgggtgttaacattacact

SEQ ID NO: 320 - RNA, 20 nt, synthetic construct
  misc_feature 1..20: note = Synthetic
  source 1..20: mol_type = other RNA
tgtacagattggattccgct

SEQ ID NO: 321 - RNA, 20 nt, synthetic construct
  misc_feature 1..20: note = Synthetic
  source 1..20: mol_type = other RNA
cctacacacactcattgtgg

SEQ ID NO: 322 - RNA, 20 nt, synthetic construct
  misc_feature 1..20: note = Synthetic
  source 1..20: mol_type = other RNA
atccgtgtccaattatggtc

SEQ ID NO: 323 - RNA, 20 nt, synthetic construct
  misc_feature 1..20: note = Synthetic
  source 1..20: mol_type = other RNA
gacataccttcactttctcg

SEQ ID NO: 324 - RNA, 20 nt, synthetic construct
  misc_feature 1..20: note = Synthetic
  source 1..20: mol_type = other RNA
ctgattccatggcgacctga

SEQ ID NO: 325 - RNA, 20 nt, synthetic construct
  misc_feature 1..20: note = Synthetic
  source 1..20: mol_type = other RNA
gcaatggcatgtatacaagc

SEQ ID NO: 326 - RNA, 20 nt, synthetic construct
  misc_feature 1..20: note = Synthetic
  source 1..20: mol_type = other RNA
cgtttactgcaacagaacct

SEQ ID NO: 327 - RNA, 20 nt, synthetic construct
  misc_feature 1..20: note = Synthetic
  source 1..20: mol_type = other RNA
cctgaggactcaattcagtt

SEQ ID NO: 328 - RNA, 20 nt, synthetic construct
  misc_feature 1..20: note = Synthetic
  source 1..20: mol_type = other RNA
ttaggagcctaagttgccaa

SEQ ID NO: 329 - RNA, 20 nt, synthetic construct
  misc_feature 1..20: note = Synthetic
  source 1..20: mol_type = other RNA
tacctgaccataattggaca

SEQ ID NO: 330 - RNA, 20 nt, synthetic construct
  misc_feature 1..20: note = Synthetic
  source 1..20: mol_type = other RNA
cgtgggtgttaacattacac

SEQ ID NO: 331 - RNA, 20 nt, synthetic construct
  misc_feature 1..20: note = Synthetic
  source 1..20: mol_type = other RNA
tgtgagagctactcttatct

SEQ ID NO: 332 - RNA, 20 nt, synthetic construct
  misc_feature 1..20: note = Synthetic
  source 1..20: mol_type = other RNA
gcacatccttatgcacttcc

SEQ ID NO: 333 - RNA, 20 nt, synthetic construct
  misc_feature 1..20: note = Synthetic
  source 1..20: mol_type = other RNA
tgctggaacgatgttgcagc

SEQ ID NO: 334 - RNA, 20 nt, synthetic construct
  misc_feature 1..20: note = Synthetic
  source 1..20: mol_type = other RNA
gcgtttactgcaacagaacc

SEQ ID NO: 335 - RNA, 20 nt, synthetic construct
  misc_feature 1..20: note = Synthetic
  source 1..20: mol_type = other RNA
cactgcagtggccaacaacc

SEQ ID NO: 336 - RNA, 20 nt, synthetic construct
  misc_feature 1..20: note = Synthetic
  source 1..20: mol_type = other RNA
ggctactaaggcctggttgt

SEQ ID NO: 337 - RNA, 20 nt, synthetic construct
  misc_feature 1..20: note = Synthetic
  source 1..20: mol_type = other RNA
gcatcactgcttatctcgct

SEQ ID NO: 338 - RNA, 20 nt, synthetic construct
  misc_feature 1..20: note = Synthetic
  source 1..20: mol_type = other RNA
agacaatccgtgtccaatta

SEQ ID NO: 339 - RNA, 20 nt, synthetic construct
  misc_feature 1..20: note = Synthetic
  source 1..20: mol_type = other RNA
gccatacctggaagtgcata

SEQ ID NO: 340 - RNA, 20 nt, synthetic construct
  misc_feature 1..20: note = Synthetic
  source 1..20: mol_type = other RNA
ggacagtcatgactataacc

SEQ ID NO: 341 - RNA, 20 nt, synthetic construct
  misc_feature 1..20: note = Synthetic
  source 1..20: mol_type = other RNA
cagccaccttcattccccaa

SEQ ID NO: 342 - RNA, 20 nt, synthetic construct
  misc_feature 1..20: note = Synthetic
  source 1..20: mol_type = other RNA
gttataacagcaggtgactg

SEQ ID NO: 343 - RNA, 20 nt, synthetic construct
  misc_feature 1..20: note = Synthetic
  source 1..20: mol_type = other RNA
agcgagcccttggggaatga

SEQ ID NO: 344 - RNA, 20 nt, synthetic construct
  misc_feature 1..20: note = Synthetic
  source 1..20: mol_type = other RNA
ttgcttgtccaggtggtcca

SEQ ID NO: 345 - RNA, 20 nt, synthetic construct
  misc_feature 1..20: note = Synthetic
  source 1..20: mol_type = other RNA
tatgagcagcaggcacagaa

SEQ ID NO: 346 - RNA, 20 nt, synthetic construct
  misc_feature 1..20: note = Synthetic
  source 1..20: mol_type = other RNA
ggcggcagagactttcatgc

SEQ ID NO: 347 - RNA, 20 nt, synthetic construct
  misc_feature 1..20: note = Synthetic
  source 1..20: mol_type = other RNA
tacctggctgagcgagccct

SEQ ID NO: 348 - RNA, 20 nt, synthetic construct
  misc_feature 1..20: note = Synthetic
  source 1..20: mol_type = other RNA
gcagccaccttcattcccca

SEQ ID NO: 349 - RNA, 20 nt, synthetic construct
  misc_feature 1..20: note = Synthetic
  source 1..20: mol_type = other RNA
ataggaagatctcagtgcag

SEQ ID NO: 350 - RNA, 20 nt, synthetic construct
  misc_feature 1..20: note = Synthetic
  source 1..20: mol_type = other RNA
gagcagcaggcacagaaggg

SEQ ID NO: 351 - RNA, 20 nt, synthetic construct
  misc_feature 1..20: note = Synthetic
  source 1..20: mol_type = other RNA
cctggctgagcgagcccttg

SEQ ID NO: 352 - RNA, 20 nt, synthetic construct
  misc_feature 1..20: note = Synthetic
  source 1..20: mol_type = other RNA
acctggctgagcgagccctt

SEQ ID NO: 353 - RNA, 20 nt, synthetic construct
  misc_feature 1..20: note = Synthetic
  source 1..20: mol_type = other RNA
aagttataacagcaggtgac

SEQ ID NO: 354 - RNA, 20 nt, synthetic construct
  misc_feature 1..20: note = Synthetic
  source 1..20: mol_type = other RNA
gagcccttggggaatgaagg

SEQ ID NO: 355 - RNA, 20 nt, synthetic construct
  misc_feature 1..20: note = Synthetic
  source 1..20: mol_type = other RNA
agttataacagcaggtgact

SEQ ID NO: 356 - RNA, 20 nt, synthetic construct
  misc_feature 1..20: note = Synthetic
  source 1..20: mol_type = other RNA
gtgttcaagtcttcggagtt

SEQ ID NO: 357 - RNA, 20 nt, synthetic construct
  misc_feature 1..20: note = Synthetic
  source 1..20: mol_type = other RNA
attggtgaagttataacagc

SEQ ID NO: 358 - RNA, 20 nt, synthetic construct
  misc_feature 1..20: note = Synthetic
  source 1..20: mol_type = other RNA
attctgtggaatctgccggg

SEQ ID NO: 359 - RNA, 20 nt, synthetic construct
  misc_feature 1..20: note = Synthetic
  source 1..20: mol_type = other RNA
cctggagctgagtgcctgag

SEQ ID NO: 360 - RNA, 20 nt, synthetic construct
  misc_feature 1..20: note = Synthetic
  source 1..20: mol_type = other RNA
tctggacccactcctcactg

SEQ ID NO: 361 - RNA, 20 nt, synthetic construct
  misc_feature 1..20: note = Synthetic
  source 1..20: mol_type = other RNA
actggcacttacatgacacc

SEQ ID NO: 362 - RNA, 20 nt, synthetic construct
  misc_feature 1..20: note = Synthetic
  source 1..20: mol_type = other RNA
actcacgtgatgcagagaac

SEQ ID NO: 363 - RNA, 20 nt, synthetic construct
  misc_feature 1..20: note = Synthetic
  source 1..20: mol_type = other RNA
ggtctgtgctgaccccagtg

SEQ ID NO: 364 - RNA, 20 nt, synthetic construct
  misc_feature 1..20: note = Synthetic
  source 1..20: mol_type = other RNA
cctaaccaagcgaagccggc

SEQ ID NO: 365 - RNA, 20 nt, synthetic construct
  misc_feature 1..20: note = Synthetic
  source 1..20: mol_type = other RNA
gactggcacttacatgacac

SEQ ID NO: 366 - RNA, 20 nt, synthetic construct
  misc_feature 1..20: note = Synthetic
  source 1..20: mol_type = other RNA
gtgctgaccccagtgaggag

SEQ ID NO: 367 - RNA, 20 nt, synthetic construct
  misc_feature 1..20: note = Synthetic
  source 1..20: mol_type = other RNA
gcttcctaaccaagcgaagc

SEQ ID NO: 368 - RNA, 20 nt, synthetic construct
  misc_feature 1..20: note = Synthetic
  source 1..20: mol_type = other RNA
acagacctgccggcttcgct

SEQ ID NO: 369 - RNA, 20 nt, synthetic construct
  misc_feature 1..20: note = Synthetic
  source 1..20: mol_type = other RNA
cctgccggcttcgcttggtt

SEQ ID NO: 370 - RNA, 20 nt, synthetic construct
  misc_feature 1..20: note = Synthetic
  source 1..20: mol_type = other RNA
agagagccatggtgcagagg

SEQ ID NO: 371 - RNA, 20 nt, synthetic construct
  misc_feature 1..20: note = Synthetic
  source 1..20: mol_type = other RNA
ggtgcagaggaggacagcaa

SEQ ID NO: 372 - RNA, 20 nt, synthetic construct
  misc_feature 1..20: note = Synthetic
  source 1..20: mol_type = other RNA
tcacctgctcagaatcatgc

SEQ ID NO: 373 - RNA, 20 nt, synthetic construct
  misc_feature 1..20: note = Synthetic
  source 1..20: mol_type = other RNA
tagtcagctatgaaattctg

SEQ ID NO: 374 - RNA, 20 nt, synthetic construct
  misc_feature 1..20: note = Synthetic
  source 1..20: mol_type = other RNA
gaaattctgtggaatctgcc

SEQ ID NO: 375 - RNA, 20 nt, synthetic construct
  misc_feature 1..20: note = Synthetic
  source 1..20: mol_type = other RNA
ctgagactcacacgactgct

SEQ ID NO: 376 - RNA, 20 nt, synthetic construct
  misc_feature 1..20: note = Synthetic
  source 1..20: mol_type = other RNA
aggtaccatgaaggtctccg

SEQ ID NO: 377 - RNA, 20 nt, synthetic construct
  misc_feature 1..20: note = Synthetic
  source 1..20: mol_type = other RNA
tatgactcccggctgaacaa

SEQ ID NO: 378 - RNA, 20 nt, synthetic construct
  misc_feature 1..20: note = Synthetic
  source 1..20: mol_type = other RNA
gtatgactcccggctgaaca

SEQ ID NO: 379 - RNA, 20 nt, synthetic construct
  misc_feature 1..20: note = Synthetic
  source 1..20: mol_type = other RNA
gactcacacgactgctgggt

SEQ ID NO: 380 - RNA, 20 nt, synthetic construct
  misc_feature 1..20: note = Synthetic
  source 1..20: mol_type = other RNA
tactccttgatgtgggcacg

SEQ ID NO: 381 - RNA, 20 nt, synthetic construct
  misc_feature 1..20: note = Synthetic
  source 1..20: mol_type = other RNA
tagcaatgaggatgacagcg

SEQ ID NO: 382 - RNA, 20 nt, synthetic construct
  misc_feature 1..20: note = Synthetic
  source 1..20: mol_type = other RNA
ctgggttggcacacacttgg

SEQ ID NO: 383 - RNA, 20 nt, synthetic construct
  misc_feature 1..20: note = Synthetic
  source 1..20: mol_type = other RNA
tctttggcatccttgacctg

SEQ ID NO: 384 - RNA, 20 nt, synthetic construct
  misc_feature 1..20: note = Synthetic
  source 1..20: mol_type = other RNA
ctctcccacaggtaccatga

SEQ ID NO: 385 - RNA, 20 nt, synthetic construct
  misc_feature 1..20: note = Synthetic
  source 1..20: mol_type = other RNA
taccccacccgctccttgaa

SEQ ID NO: 386 - RNA, 20 nt, synthetic construct
  misc_feature 1..20: note = Synthetic
  source 1..20: mol_type = other RNA
ggtagaatctgggcccttca

SEQ ID NO: 387 - RNA, 20 nt, synthetic construct
  misc_feature 1..20: note = Synthetic
  source 1..20: mol_type = other RNA
tctctgggttggcacacact

SEQ ID NO: 388 - RNA, 20 nt, synthetic construct
  misc_feature 1..20: note = Synthetic
  source 1..20: mol_type = other RNA
atactccttgatgtgggcac

SEQ ID NO: 389 - RNA, 20 nt, synthetic construct
  misc_feature 1..20: note = Synthetic
  source 1..20: mol_type = other RNA
ggtgtggtgtccgaggaatc

SEQ ID NO: 390 - RNA, 20 nt, synthetic construct
  misc_feature 1..20: note = Synthetic
  source 1..20: mol_type = other RNA
tcaagaccaggacttacatg

SEQ ID NO: 391 - RNA, 20 nt, synthetic construct
  misc_feature 1..20: note = Synthetic
  source 1..20: mol_type = other RNA
agaccaggacttacatgggg

SEQ ID NO: 392 - RNA, 20 nt, synthetic construct
  misc_feature 1..20: note = Synthetic
  source 1..20: mol_type = other RNA
acatacattacagcttcccg

SEQ ID NO: 393 - RNA, 20 nt, synthetic construct
  misc_feature 1..20: note = Synthetic
  source 1..20: mol_type = other RNA
gtcctggacccacttctgtg

SEQ ID NO: 394 - RNA, 20 nt, synthetic construct
  misc_feature 1..20: note = Synthetic
  source 1..20: mol_type = other RNA
ccggggacagtggctactgg

SEQ ID NO: 395 - RNA, 20 nt, synthetic construct
  misc_feature 1..20: note = Synthetic
  source 1..20: mol_type = other RNA
cctggacccacttctgtgtg

SEQ ID NO: 396 - RNA, 20 nt, synthetic construct
  misc_feature 1..20: note = Synthetic
  source 1..20: mol_type = other RNA
tcctggacccacttctgtgt

SEQ ID NO: 397 - RNA, 20 nt, synthetic construct
  misc_feature 1..20: note = Synthetic
  source 1..20: mol_type = other RNA
ctggctgagcaagcccctgg

SEQ ID NO: 398 - RNA, 20 nt, synthetic construct
  misc_feature 1..20: note = Synthetic
  source 1..20: mol_type = other RNA
ttacagcttcccggggacag

SEQ ID NO: 399 - RNA, 20 nt, synthetic construct
  misc_feature 1..20: note = Synthetic
  source 1..20: mol_type = other RNA
acagatctccttgtccagtt

SEQ ID NO: 400 - RNA, 20 nt, synthetic construct
  misc_feature 1..20: note = Synthetic
  source 1..20: mol_type = other RNA
caccagtagccactgtcccc

SEQ ID NO: 401 - RNA, 20 nt, synthetic construct
  misc_feature 1..20: note = Synthetic
  source 1..20: mol_type = other RNA
cagctgctttcagcccccag

SEQ ID NO: 402 - RNA, 20 nt, synthetic construct
  misc_feature 1..20: note = Synthetic
  source 1..20: mol_type = other RNA
gtccattgagggtgtgtcct

SEQ ID NO: 403 - RNA, 20 nt, synthetic construct
  misc_feature 1..20: note = Synthetic
  source 1..20: mol_type = other RNA
agtccattgagggtgtgtcc

SEQ ID NO: 404 - RNA, 20 nt, synthetic construct
  misc_feature 1..20: note = Synthetic
  source 1..20: mol_type = other RNA
acaagaagaaaagtccattg

SEQ ID NO: 405 - RNA, 20 nt, synthetic construct
  misc_feature 1..20: note = Synthetic
  source 1..20: mol_type = other RNA
gacccaggacacaccctcaa

SEQ ID NO: 406 - RNA, 20 nt, synthetic construct
  misc_feature 1..20: note = Synthetic
  source 1..20: mol_type = other RNA
ttcccggggacagtggctac

SEQ ID NO: 407 - RNA, 20 nt, synthetic construct
  misc_feature 1..20: note = Synthetic
  source 1..20: mol_type = other RNA
ccaccagtagccactgtccc

SEQ ID NO: 408 - RNA, 20 nt, synthetic construct
  misc_feature 1..20: note = Synthetic
  source 1..20: mol_type = other RNA
ccaggtgcttcataaagtcc

SEQ ID NO: 409 - RNA, 20 nt, synthetic construct
  misc_feature 1..20: note = Synthetic
  source 1..20: mol_type = other RNA
cttctgattcgccgcagagg

SEQ ID NO: 410 - RNA, 20 nt, synthetic construct
  misc_feature 1..20: note = Synthetic
  source 1..20: mol_type = other RNA
gtgctgctactccacctctg

SEQ ID NO: 411 - RNA, 20 nt, synthetic construct
  misc_feature 1..20: note = Synthetic
  source 1..20: mol_type = other RNA
acacggcagctggccaatga

SEQ ID NO: 412 - RNA, 20 nt, synthetic construct
  misc_feature 1..20: note = Synthetic
  source 1..20: mol_type = other RNA
atgtcagtgtaacatacctg

SEQ ID NO: 413 - RNA, 20 nt, synthetic construct
  misc_feature 1..20: note = Synthetic
  source 1..20: mol_type = other RNA
taccttctgattcgccgcag

SEQ ID NO: 414 - RNA, 20 nt, synthetic construct
  misc_feature 1..20: note = Synthetic
  source 1..20: mol_type = other RNA
caaactcttggtacagcaca

SEQ ID NO: 415 - RNA, 20 nt, synthetic construct
  misc_feature 1..20: note = Synthetic
  source 1..20: mol_type = other RNA
gcgcaaatccaaaacagact

SEQ ID NO: 416 - RNA, 20 nt, synthetic construct
  misc_feature 1..20: note = Synthetic
  source 1..20: mol_type = other RNA
aatttattgtgggcttcaca

SEQ ID NO: 417 - RNA, 20 nt, synthetic construct
  misc_feature 1..20: note = Synthetic
  source 1..20: mol_type = other RNA
cgcaaatccaaaacagactt

SEQ ID NO: 418 - RNA, 20 nt, synthetic construct
  misc_feature 1..20: note = Synthetic
  source 1..20: mol_type = other RNA
ctgtaccaagagtttgctcc

SEQ ID NO: 419 - RNA, 20 nt, synthetic construct
  misc_feature 1..20: note = Synthetic
  source 1..20: mol_type = other RNA
agcagccaggagcaaactct

SEQ ID NO: 420 - RNA, 20 nt, synthetic construct
  misc_feature 1..20: note = Synthetic
  source 1..20: mol_type = other RNA
gcactgacatcaaagcagcc

SEQ ID NO: 421 - RNA, 20 nt, synthetic construct
  misc_feature 1..20: note = Synthetic
  source 1..20: mol_type = other RNA
cacctctgcggcgaatcaga

SEQ ID NO: 422 - RNA, 20 nt, synthetic construct
  misc_feature 1..20: note = Synthetic
  source 1..20: mol_type = other RNA
tgtgggcttcacacggcagc

SEQ ID NO: 423 - RNA, 20 nt, synthetic construct
  misc_feature 1..20: note = Synthetic
  source 1..20: mol_type = other RNA
attgatgtcacagccttcat

SEQ ID NO: 424 - RNA, 20 nt, synthetic construct
  misc_feature 1..20: note = Synthetic
  source 1..20: mol_type = other RNA
agcaactttgactgctgtct

SEQ ID NO: 425 - RNA, 20 nt, synthetic construct
  misc_feature 1..20: note = Synthetic
  source 1..20: mol_type = other RNA
gtgaagcccacaataaattt

SEQ ID NO: 426 - RNA, 20 nt, synthetic construct
  misc_feature 1..20: note = Synthetic
  source 1..20: mol_type = other RNA
cgaacgtccatgctgcacag

SEQ ID NO: 427 - RNA, 20 nt, synthetic construct
  misc_feature 1..20: note = Synthetic
  source 1..20: mol_type = other RNA
aagactcgactcacccgcga

SEQ ID NO: 428 - RNA, 20 nt, synthetic construct
  misc_feature 1..20: note = Synthetic
  source 1..20: mol_type = other RNA
cttgaactccaccggcaggg

SEQ ID NO: 429 - RNA, 20 nt, synthetic construct
  misc_feature 1..20: note = Synthetic
  source 1..20: mol_type = other RNA
accgtaccaccgaagatgca

SEQ ID NO: 430 - RNA, 20 nt, synthetic construct
  misc_feature 1..20: note = Synthetic
  source 1..20: mol_type = other RNA
gacccatgcgacccgcacaa

SEQ ID NO: 431 - RNA, 20 nt, synthetic construct
  misc_feature 1..20: note = Synthetic
  source 1..20: mol_type = other RNA
gaagactcgactcacccgcg

SEQ ID NO: 432 - RNA, 20 nt, synthetic construct
  misc_feature 1..20: note = Synthetic
  source 1..20: mol_type = other RNA
ggtggtacggtgtaccgcag

SEQ ID NO: 433 - RNA, 20 nt, synthetic construct
  misc_feature 1..20: note = Synthetic
  source 1..20: mol_type = other RNA
tctggaaggactctccgctg

SEQ ID NO: 434 - RNA, 20 nt, synthetic construct
  misc_feature 1..20: note = Synthetic
  source 1..20: mol_type = other RNA
cgggtcgcatgggtcgcgct

SEQ ID NO: 435 - RNA, 20 nt, synthetic construct
  misc_feature 1..20: note = Synthetic
  source 1..20: mol_type = other RNA
gttcaagtgccctgacggcg

SEQ ID NO: 436 - RNA, 20 nt, synthetic construct
  misc_feature 1..20: note = Synthetic
  source 1..20: mol_type = other RNA
gggggtgcagcatcggccgt

SEQ ID NO: 437 - RNA, 20 nt, synthetic construct
  misc_feature 1..20: note = Synthetic
  source 1..20: mol_type = other RNA
cgagcccaaggaccaaaccg

SEQ ID NO: 438 - RNA, 20 nt, synthetic construct
  misc_feature 1..20: note = Synthetic
  source 1..20: mol_type = other RNA
ctgcagttctggccgacggc

SEQ ID NO: 439 - RNA, 20 nt, synthetic construct
  misc_feature 1..20: note = Synthetic
  source 1..20: mol_type = other RNA
gcggacggggcccatactgg

SEQ ID NO: 440 - RNA, 20 nt, synthetic construct
  misc_feature 1..20: note = Synthetic
  source 1..20: mol_type = other RNA
tatgattagagccaactgcc

SEQ ID NO: 441 - RNA, 20 nt, synthetic construct
  misc_feature 1..20: note = Synthetic
  source 1..20: mol_type = other RNA
tgctctcgcagcttaccgac

SEQ ID NO: 442 - RNA, 20 nt, synthetic construct
  misc_feature 1..20: note = Synthetic
  source 1..20: mol_type = other RNA
tccgggacagttgtaatggc

SEQ ID NO: 443 - RNA, 20 nt, synthetic construct
  misc_feature 1..20: note = Synthetic
  source 1..20: mol_type = other RNA
gttgtcattggtaacccggg

SEQ ID NO: 444 - RNA, 20 nt, synthetic construct
  misc_feature 1..20: note = Synthetic
  source 1..20: mol_type = other RNA
gggcaggcccaaccacggtt

SEQ ID NO: 445 - RNA, 20 nt, synthetic construct
  misc_feature 1..20: note = Synthetic
  source 1..20: mol_type = other RNA
acgaacgtccatgctgcaca

SEQ ID NO: 446 - RNA, 20 nt, synthetic construct
  misc_feature 1..20: note = Synthetic
  source 1..20: mol_type = other RNA
cccgctgcagttctggccga

SEQ ID NO: 447 - RNA, 20 nt, synthetic construct
  misc_feature 1..20: note = Synthetic
  source 1..20: mol_type = other RNA
tcagggcacttgaactccac

SEQ ID NO: 448 - RNA, 20 nt, synthetic construct
  misc_feature 1..20: note = Synthetic
  source 1..20: mol_type = other RNA
ttctgtggagtatgtaccga

SEQ ID NO: 449 - RNA, 20 nt, synthetic construct
  misc_feature 1..20: note = Synthetic
  source 1..20: mol_type = other RNA
agagccgcctgtgcatggtc

SEQ ID NO: 450 - RNA, 20 nt, synthetic construct
  misc_feature 1..20: note = Synthetic
  source 1..20: mol_type = other RNA
ggcgttgtcattggtaaccc

SEQ ID NO: 451 - RNA, 20 nt, synthetic construct
  misc_feature 1..20: note = Synthetic
  source 1..20: mol_type = other RNA
ggccaaacgtgtcttccagt

SEQ ID NO: 452 - RNA, 20 nt, synthetic construct
  misc_feature 1..20: note = Synthetic
  source 1..20: mol_type = other RNA
agcttgaccctcctcgggaa

SEQ ID NO: 453 - RNA, 20 nt, synthetic construct
  misc_feature 1..20: note = Synthetic
  source 1..20: mol_type = other RNA
agcacgaggctcacgcccgc

SEQ ID NO: 454 - RNA, 20 nt, synthetic construct
  misc_feature 1..20: note = Synthetic
  source 1..20: mol_type = other RNA
gacggggcccatactggcgg

SEQ ID NO: 455 - RNA, 20 nt, synthetic construct
  misc_feature 1..20: note = Synthetic
  source 1..20: mol_type = other RNA
agctcggtatgtcttcatgc

SEQ ID NO: 456 - RNA, 20 nt, synthetic construct
  misc_feature 1..20: note = Synthetic
  source 1..20: mol_type = other RNA
cgcaaggcctgaccatgcac

SEQ ID NO: 457 - RNA, 20 nt, synthetic construct
  misc_feature 1..20: note = Synthetic
  source 1..20: mol_type = other RNA
taccgactggaagacacgtt

SEQ ID NO: 458 - RNA, 20 nt, synthetic construct
  misc_feature 1..20: note = Synthetic
  source 1..20: mol_type = other RNA
gcttgaccctcctcgggaag

SEQ ID NO: 459 - RNA, 20 nt, synthetic construct
  misc_feature 1..20: note = Synthetic
  source 1..20: mol_type = other RNA
gacgaacgtccatgctgcac

SEQ ID NO: 460 - RNA, 20 nt, synthetic construct
  misc_feature 1..20: note = Synthetic
  source 1..20: mol_type = other RNA
ccagtgcacgtgcctggacg

SEQ ID NO: 461 - RNA, 20 nt, synthetic construct
  misc_feature 1..20: note = Synthetic
  source 1..20: mol_type = other RNA
caagtaccagtgcacgtgcc

SEQ ID NO: 462 - RNA, 20 nt, synthetic construct
  misc_feature 1..20: note = Synthetic
  source 1..20: mol_type = other RNA
tccctgcatcttcggtggta

SEQ ID NO: 463 - RNA, 20 nt, synthetic construct
  misc_feature 1..20: note = Synthetic
  source 1..20: mol_type = other RNA
tccccggccaaccgcaagat

SEQ ID NO: 464 - RNA, 20 nt, synthetic construct
  misc_feature 1..20: note = Synthetic
  source 1..20: mol_type = other RNA
cggtgcacacgccgatcttg

SEQ ID NO: 465 - RNA, 20 nt, synthetic construct
  misc_feature 1..20: note = Synthetic
  source 1..20: mol_type = other RNA
acgccgatcttgcggttggc

SEQ ID NO: 466 - RNA, 20 nt, synthetic construct
  misc_feature 1..20: note = Synthetic
  source 1..20: mol_type = other RNA
attctgtcacttcggctccc

SEQ ID NO: 467 - RNA, 20 nt, synthetic construct
  misc_feature 1..20: note = Synthetic
  source 1..20: mol_type = other RNA
accatgaccgccgccagtat

SEQ ID NO: 468 - RNA, 20 nt, synthetic construct
  misc_feature 1..20: note = Synthetic
  source 1..20: mol_type = other RNA
aaccatgaccgccgccagta

SEQ ID NO: 469 - RNA, 20 nt, synthetic construct
  misc_feature 1..20: note = Synthetic
  source 1..20: mol_type = other RNA
tgtctccgggacagttgtaa

SEQ ID NO: 470 - RNA, 20 nt, synthetic construct
  misc_feature 1..20: note = Synthetic
  source 1..20: mol_type = other RNA
cccaaggaccaaaccgtggt

SEQ ID NO: 471 - RNA, 20 nt, synthetic construct
  misc_feature 1..20: note = Synthetic
  source 1..20: mol_type = other RNA
cagcttgaccctcctcggga

SEQ ID NO: 472 - RNA, 20 nt, synthetic construct
  misc_feature 1..20: note = Synthetic
  source 1..20: mol_type = other RNA
cgcaagatcggcgtgtgcac

SEQ ID NO: 473 - RNA, 20 nt, synthetic construct
  misc_feature 1..20: note = Synthetic
  source 1..20: mol_type = other RNA
cgacccatgcgacccgcaca

SEQ ID NO: 474 - RNA, 20 nt, synthetic construct
  misc_feature 1..20: note = Synthetic
  source 1..20: mol_type = other RNA
ggagcgccggatgtgccgac

SEQ ID NO: 475 - RNA, 20 nt, synthetic construct
  misc_feature 1..20: note = Synthetic
  source 1..20: mol_type = other RNA
acgcaactttgagcgcaaca

SEQ ID NO: 476 - RNA, 20 nt, synthetic construct
  misc_feature 1..20: note = Synthetic
  source 1..20: mol_type = other RNA
catcagcattgaccgctacg

SEQ ID NO: 477 - RNA, 20 nt, synthetic construct
  misc_feature 1..20: note = Synthetic
  source 1..20: mol_type = other RNA
aggcagaagagtcgcctatg

SEQ ID NO: 478 - RNA, 20 nt, synthetic construct
  misc_feature 1..20: note = Synthetic
  source 1..20: mol_type = other RNA
ccggcgctcctccatgagtg

SEQ ID NO: 479 - RNA, 20 nt, synthetic construct
  misc_feature 1..20: note = Synthetic
  source 1..20: mol_type = other RNA
gccgcgctgtaggcccagaa

SEQ ID NO: 480 - RNA, 20 nt, synthetic construct
  misc_feature 1..20: note = Synthetic
  source 1..20: mol_type = other RNA
gaggtcacggacgattacat

SEQ ID NO: 481 - RNA, 20 nt, synthetic construct
  misc_feature 1..20: note = Synthetic
  source 1..20: mol_type = other RNA
gcgctcctccatgagtgtgg

SEQ ID NO: 482 - RNA, 20 nt, synthetic construct
  misc_feature 1..20: note = Synthetic
  source 1..20: mol_type = other RNA
tcccttctgggcctacagcg

SEQ ID NO: 483 - RNA, 20 nt, synthetic construct
  misc_feature 1..20: note = Synthetic
  source 1..20: mol_type = other RNA
gagcaggtaggtatcggtca

SEQ ID NO: 484 - RNA, 20 nt, synthetic construct
  misc_feature 1..20: note = Synthetic
  source 1..20: mol_type = other RNA
ccgtgacctcatcttgacac

SEQ ID NO: 485 - RNA, 20 nt, synthetic construct
  misc_feature 1..20: note = Synthetic
  source 1..20: mol_type = other RNA
gcggaacttgacgccgatga

SEQ ID NO: 486 - RNA, 20 nt, synthetic construct
  misc_feature 1..20: note = Synthetic
  source 1..20: mol_type = other RNA
taggcccacgaaacaaatga

SEQ ID NO: 487 - RNA, 20 nt, synthetic construct
  misc_feature 1..20: note = Synthetic
  source 1..20: mol_type = other RNA
caggcagaagagtcgcctat

SEQ ID NO: 488 - RNA, 20 nt, synthetic construct
  misc_feature 1..20: note = Synthetic
  source 1..20: mol_type = other RNA
gccaggaccaccccattgta

SEQ ID NO: 489 - RNA, 20 nt, synthetic construct
  misc_feature 1..20: note = Synthetic
  source 1..20: mol_type = other RNA
ctacgacgtcacctacagcc

SEQ ID NO: 490 - RNA, 20 nt, synthetic construct
  misc_feature 1..20: note = Synthetic
  source 1..20: mol_type = other RNA
ggtctcggcctccacactca

SEQ ID NO: 491 - RNA, 20 nt, synthetic construct
  misc_feature 1..20: note = Synthetic
  source 1..20: mol_type = other RNA
ccgatgaaggcgtacaagaa

SEQ ID NO: 492 - RNA, 20 nt, synthetic construct
  misc_feature 1..20: note = Synthetic
  source 1..20: mol_type = other RNA
tgcgctcaaagttgcgtgcc

SEQ ID NO: 493 - RNA, 20 nt, synthetic construct
  misc_feature 1..20: note = Synthetic
  source 1..20: mol_type = other RNA
ctacagcgcggccaagtcct

SEQ ID NO: 494 - RNA, 20 nt, synthetic construct
  misc_feature 1..20: note = Synthetic
  source 1..20: mol_type = other RNA
tgatggagtacatgataggg

SEQ ID NO: 495 - RNA, 20 nt, synthetic construct
  misc_feature 1..20: note = Synthetic
  source 1..20: mol_type = other RNA
ccacactcatggaggagcgc

SEQ ID NO: 496 - RNA, 20 nt, synthetic construct
  misc_feature 1..20: note = Synthetic
  source 1..20: mol_type = other RNA
catcaaggtgatcatcgctg

SEQ ID NO: 497 - RNA, 20 nt, synthetic construct
  misc_feature 1..20: note = Synthetic
  source 1..20: mol_type = other RNA
tcgtgggcctactgggcaat

SEQ ID NO: 498 - RNA, 20 nt, synthetic construct
  misc_feature 1..20: note = Synthetic
  source 1..20: mol_type = other RNA
acgtgcggaactttaaagcc

SEQ ID NO: 499 - RNA, 20 nt, synthetic construct
  misc_feature 1..20: note = Synthetic
  source 1..20: mol_type = other RNA
gttgacgcagcagcggacgc

SEQ ID NO: 500 - RNA, 20 nt, synthetic construct
  misc_feature 1..20: note = Synthetic
  source 1..20: mol_type = other RNA
ccaggacttggccgcgctgt

SEQ ID NO: 501 - RNA, 20 nt, synthetic construct
  misc_feature 1..20: note = Synthetic
  source 1..20: mol_type = other RNA
aaagttccgcacgtccttct

SEQ ID NO: 502 - RNA, 20 nt, synthetic construct
  misc_feature 1..20: note = Synthetic
  source 1..20: mol_type = other RNA
tgttgaagttggccaccgtc

SEQ ID NO: 503 - RNA, 20 nt, synthetic construct
  misc_feature 1..20: note = Synthetic
  source 1..20: mol_type = other RNA
ccgctacgtggccatcgtcc

SEQ ID NO: 504 - RNA, 20 nt, synthetic construct
  misc_feature 1..20: note = Synthetic
  source 1..20: mol_type = other RNA
gaaaccaatgaaaagcgtgc

SEQ ID NO: 505 - RNA, 20 nt, synthetic construct
  misc_feature 1..20: note = Synthetic
  source 1..20: mol_type = other RNA
caggctgtaggtgacgtcgt

SEQ ID NO: 506 - RNA, 20 nt, synthetic construct
  misc_feature 1..20: note = Synthetic
  source 1..20: mol_type = other RNA
cctacagcgcggccaagtcc

SEQ ID NO: 507 - RNA, 20 nt, synthetic construct
  misc_feature 1..20: note = Synthetic
  source 1..20: mol_type = other RNA
gtactccatcatttgtttcg

SEQ ID NO: 508 - RNA, 20 nt, synthetic construct
  misc_feature 1..20: note = Synthetic
  source 1..20: mol_type = other RNA
cgatgaaggcgtacaagaaa

SEQ ID NO: 509 - RNA, 20 nt, synthetic construct
  misc_feature 1..20: note = Synthetic
  source 1..20: mol_type = other RNA
tcttccagctgccctacaat

SEQ ID NO: 510 - RNA, 20 nt, synthetic construct
  misc_feature 1..20: note = Synthetic
  source 1..20: mol_type = other RNA
accaatgaaaagcgtgctgg

SEQ ID NO: 511 - RNA, 20 nt, synthetic construct
  misc_feature 1..20: note = Synthetic
  source 1..20: mol_type = other RNA
accaccagcacgcttttcat

SEQ ID NO: 512 - RNA, 20 nt, synthetic construct
  misc_feature 1..20: note = Synthetic
  source 1..20: mol_type = other RNA
gttgaagttggccaccgtct

SEQ ID NO: 513 - RNA, 20 nt, synthetic construct
  misc_feature 1..20: note = Synthetic
  source 1..20: mol_type = other RNA
tcctctggaggtcactgtac

SEQ ID NO: 514 - RNA, 20 nt, synthetic construct
  misc_feature 1..20: note = Synthetic
  source 1..20: mol_type = other RNA
tactccatcatttgtttcgt

SEQ ID NO: 515 - RNA, 20 nt, synthetic construct
  misc_feature 1..20: note = Synthetic
  source 1..20: mol_type = other RNA
cctttcttgtacgccttcat

SEQ ID NO: 516 - RNA, 20 nt, synthetic construct
  misc_feature 1..20: note = Synthetic
  source 1..20: mol_type = other RNA
atttgtttcgtgggcctact

SEQ ID NO: 517 - RNA, 20 nt, synthetic construct
  misc_feature 1..20: note = Synthetic
  source 1..20: mol_type = other RNA
cacagcgatgatcaccttga

SEQ ID NO: 518 - RNA, 20 nt, synthetic construct
  misc_feature 1..20: note = Synthetic
  source 1..20: mol_type = other RNA
gagtgaagagcggctcacgg

SEQ ID NO: 519 - RNA, 20 nt, synthetic construct
  misc_feature 1..20: note = Synthetic
  source 1..20: mol_type = other RNA
ccggcgagcaccttggcgcg

SEQ ID NO: 520 - RNA, 20 nt, synthetic construct
  misc_feature 1..20: note = Synthetic
  source 1..20: mol_type = other RNA
ccgcgcgccaaggtgctcgc

SEQ ID NO: 521 - RNA, 20 nt, synthetic construct
  misc_feature 1..20: note = Synthetic
  source 1..20: mol_type = other RNA
caagctcccggcatgcagcg

SEQ ID NO: 522 - RNA, 20 nt, synthetic construct
  misc_feature 1..20: note = Synthetic
  source 1..20: mol_type = other RNA
tcaggactctggtgcctgca

SEQ ID NO: 523 - RNA, 20 nt, synthetic construct
  misc_feature 1..20: note = Synthetic
  source 1..20: mol_type = other RNA
ccacagcagtcacaggccgg

SEQ ID NO: 524 - RNA, 20 nt, synthetic construct
  misc_feature 1..20: note = Synthetic
  source 1..20: mol_type = other RNA
gggatcgccgcgctgcatgc

SEQ ID NO: 525 - RNA, 20 nt, synthetic construct
  misc_feature 1..20: note = Synthetic
  source 1..20: mol_type = other RNA
ggtgccagctccgcgcgcca

SEQ ID NO: 526 - RNA, 20 nt, synthetic construct
  misc_feature 1..20: note = Synthetic
  source 1..20: mol_type = other RNA
ggcgatcccggcgagcacct

SEQ ID NO: 527 - RNA, 20 nt, synthetic construct
  misc_feature 1..20: note = Synthetic
  source 1..20: mol_type = other RNA
tgcgcttctcagtaactacg

SEQ ID NO: 528 - RNA, 20 nt, synthetic construct
  misc_feature 1..20: note = Synthetic
  source 1..20: mol_type = other RNA
tggcaccttggcgctgttgg

SEQ ID NO: 529 - RNA, 20 nt, synthetic construct
  misc_feature 1..20: note = Synthetic
  source 1..20: mol_type = other RNA
tggatctccacagcagtcac

SEQ ID NO: 530 - RNA, 20 nt, synthetic construct
  misc_feature 1..20: note = Synthetic
  source 1..20: mol_type = other RNA
agagagtgaagagcggctca

SEQ ID NO: 531 - RNA, 20 nt, synthetic construct
  misc_feature 1..20: note = Synthetic
  source 1..20: mol_type = other RNA
cgccgccaccaacagcgcca

SEQ ID NO: 532 - RNA, 20 nt, synthetic construct
  misc_feature 1..20: note = Synthetic
  source 1..20: mol_type = other RNA
ggcgcgcggagctggcacct

SEQ ID NO: 533 - RNA, 20 nt, synthetic construct
  misc_feature 1..20: note = Synthetic
  source 1..20: mol_type = other RNA
acatatcaaaaacaccatgc

SEQ ID NO: 534 - RNA, 20 nt, synthetic construct
  misc_feature 1..20: note = Synthetic
  source 1..20: mol_type = other RNA
gcagaatgctggtgacggtg

SEQ ID NO: 535 - RNA, 20 nt, synthetic construct
  misc_feature 1..20: note = Synthetic
  source 1..20: mol_type = other RNA
agagagcagcgcgggccatg

SEQ ID NO: 536 - RNA, 20 nt, synthetic construct
  misc_feature 1..20: note = Synthetic
  source 1..20: mol_type = other RNA
acctgctgcgcgccggccag

SEQ ID NO: 537 - RNA, 20 nt, synthetic construct
  misc_feature 1..20: note = Synthetic
  source 1..20: mol_type = other RNA
gagccacactcaagaatggg

SEQ ID NO: 538 - RNA, 20 nt, synthetic construct
  misc_feature 1..20: note = Synthetic
  source 1..20: mol_type = other RNA
ctatgggggatgcaggattg

SEQ ID NO: 539 - RNA, 20 nt, synthetic construct
  misc_feature 1..20: note = Synthetic
  source 1..20: mol_type = other RNA
gcactggcagcgcagttcag

SEQ ID NO: 540 - RNA, 20 nt, synthetic construct
  misc_feature 1..20: note = Synthetic
  source 1..20: mol_type = other RNA
gagagagcagcgcgggccat

SEQ ID NO: 541 - RNA, 20 nt, synthetic construct
  misc_feature 1..20: note = Synthetic
  source 1..20: mol_type = other RNA
agtgccactcgcaggagccg

SEQ ID NO: 542 - RNA, 20 nt, synthetic construct
  misc_feature 1..20: note = Synthetic
  source 1..20: mol_type = other RNA
ttcttccctaggagcgtccg

SEQ ID NO: 543 - RNA, 20 nt, synthetic construct
  misc_feature 1..20: note = Synthetic
  source 1..20: mol_type = other RNA
acttcggtttgggcgcagtg

SEQ ID NO: 544 - RNA, 20 nt, synthetic construct
  misc_feature 1..20: note = Synthetic
  source 1..20: mol_type = other RNA
cgcgccggccagcggctacc

SEQ ID NO: 545 - RNA, 20 nt, synthetic construct
  misc_feature 1..20: note = Synthetic
  source 1..20: mol_type = other RNA
gatgattttcttaactatgg

SEQ ID NO: 546 - RNA, 20 nt, synthetic construct
  misc_feature 1..20: note = Synthetic
  source 1..20: mol_type = other RNA
ctggccggcgcgcagcaggt

SEQ ID NO: 547 - RNA, 20 nt, synthetic construct
  misc_feature 1..20: note = Synthetic
  source 1..20: mol_type = other RNA
cttggggtgaattccctgca

SEQ ID NO: 548 - RNA, 20 nt, synthetic construct
  misc_feature 1..20: note = Synthetic
  source 1..20: mol_type = other RNA
agtgtgaacgtgaagtcccc

SEQ ID NO: 549 - RNA, 20 nt, synthetic construct
  misc_feature 1..20: note = Synthetic
  source 1..20: mol_type = other RNA
gggcggcggagagagcagcg

SEQ ID NO: 550 - RNA, 20 nt, synthetic construct
  misc_feature 1..20: note = Synthetic
  source 1..20: mol_type = other RNA
ggagcagcagtgccactcgc

SEQ ID NO: 551 - RNA, 20 nt, synthetic construct
  misc_feature 1..20: note = Synthetic
  source 1..20: mol_type = other RNA
tgctcctggtagccgctggc

SEQ ID NO: 552 - RNA, 20 nt, synthetic construct
  misc_feature 1..20: note = Synthetic
  source 1..20: mol_type = other RNA
tcttaaccatgggcgatgcg

SEQ ID NO: 553 - RNA, 20 nt, synthetic construct
  misc_feature 1..20: note = Synthetic
  source 1..20: mol_type = other RNA
tctcaaccccgcatcgccca

SEQ ID NO: 554 - RNA, 20 nt, synthetic construct
  misc_feature 1..20: note = Synthetic
  source 1..20: mol_type = other RNA
tttcttaaccatgggcgatg

SEQ ID NO: 555 - RNA, 20 nt, synthetic construct
  misc_feature 1..20: note = Synthetic
  source 1..20: mol_type = other RNA
cagcgcagttcagtggccag

SEQ ID NO: 556 - RNA, 20 nt, synthetic construct
  misc_feature 1..20: note = Synthetic
  source 1..20: mol_type = other RNA
ttcttaaccatgggcgatgc

SEQ ID NO: 557 - RNA, 20 nt, synthetic construct
  misc_feature 1..20: note = Synthetic
  source 1..20: mol_type = other RNA
agagcgtggcgcgggccatg

SEQ ID NO: 558 - RNA, 20 nt, synthetic construct
  misc_feature 1..20: note = Synthetic
  source 1..20: mol_type = other RNA
acttcggtttgggcgcagtg

SEQ ID NO: 559 - RNA, 20 nt, synthetic construct
  misc_feature 1..20: note = Synthetic
  source 1..20: mol_type = other RNA
gcactggcagcgcagttcag

SEQ ID NO: 560 - RNA, 20 nt, synthetic construct
  misc_feature 1..20: note = Synthetic
  source 1..20: mol_type = other RNA
ttcttccctaggagcgcccc

SEQ ID NO: 561 - RNA, 20 nt, synthetic construct
  misc_feature 1..20: note = Synthetic
  source 1..20: mol_type = other RNA
caagaacatccaaagtgtga

SEQ ID NO: 562 - RNA, 20 nt, synthetic construct
  misc_feature 1..20: note = Synthetic
  source 1..20: mol_type = other RNA
cttgaggtgaattccctgca

SEQ ID NO: 563 - RNA, 20 nt, synthetic construct
  misc_feature 1..20: note = Synthetic
  source 1..20: mol_type = other RNA
agtgtgaaggtgaagtcccc

SEQ ID NO: 564 - RNA, 20 nt, synthetic construct
  misc_feature 1..20: note = Synthetic
  source 1..20: mol_type = other RNA
acctgctgcgcgccggctgg

SEQ ID NO: 565 - RNA, 20 nt, synthetic construct
  misc_feature 1..20: note = Synthetic
  source 1..20: mol_type = other RNA
gggacccacctgctgcgcgc

SEQ ID NO: 566 - RNA, 20 nt, synthetic construct
  misc_feature 1..20: note = Synthetic
  source 1..20: mol_type = other RNA
gagagcgtggcgcgggccat

SEQ ID NO: 567 - RNA, 20 nt, synthetic construct
  misc_feature 1..20: note = Synthetic
  source 1..20: mol_type = other RNA
gggcgagacttacatgactt

SEQ ID NO: 568 - RNA, 20 nt, synthetic construct
  misc_feature 1..20: note = Synthetic
  source 1..20: mol_type = other RNA
cagtgcttgcagaccctgca

SEQ ID NO: 569 - RNA, 20 nt, synthetic construct
  misc_feature 1..20: note = Synthetic
  source 1..20: mol_type = other RNA
tctgaaccatgggggatgcg

SEQ ID NO: 570 - RNA, 20 nt, synthetic construct
  misc_feature 1..20: note = Synthetic
  source 1..20: mol_type = other RNA
agtgtgaatgtaaggtcccc

SEQ ID NO: 571 - RNA, 20 nt, synthetic construct
  misc_feature 1..20: note = Synthetic
  source 1..20: mol_type = other RNA
cagggggagcaccaactgac

SEQ ID NO: 572 - RNA, 20 nt, synthetic construct
  misc_feature 1..20: note = Synthetic
  source 1..20: mol_type = other RNA
gatgattttctgaaccatgg

SEQ ID NO: 573 - RNA, 20 nt, synthetic construct
  misc_feature 1..20: note = Synthetic
  source 1..20: mol_type = other RNA
ttcttccctaggagcgtccg

SEQ ID NO: 574 - RNA, 20 nt, synthetic construct
  misc_feature 1..20: note = Synthetic
  source 1..20: mol_type = other RNA
acttcggtttgggcgcagtg

SEQ ID NO: 575 - RNA, 20 nt, synthetic construct
  misc_feature 1..20: note = Synthetic
  source 1..20: mol_type = other RNA
tctcaaccccgcatccccca

SEQ ID NO: 576 - RNA, 20 nt, synthetic construct
  misc_feature 1..20: note = Synthetic
  source 1..20: mol_type = other RNA
cgatgattttctgaaccatg

SEQ ID NO: 577 - RNA, 20 nt, synthetic construct
  misc_feature 1..20: note = Synthetic
  source 1..20: mol_type = other RNA
acatccaaagtgtgaatgta

SEQ ID NO: 578 - RNA, 20 nt, synthetic construct
  misc_feature 1..20: note = Synthetic
  source 1..20: mol_type = other RNA
gggaccttacattcacactt

SEQ ID NO: 579 - RNA, 20 nt, synthetic construct
  misc_feature 1..20: note = Synthetic
  source 1..20: mol_type = other RNA
cagtgcttgcagacactgca

SEQ ID NO: 580 - RNA, 20 nt, synthetic construct
  misc_feature 1..20: note = Synthetic
  source 1..20: mol_type = other RNA
gcagcgcagttcagtgacca

SEQ ID NO: 581 - RNA, 20 nt, synthetic construct
  misc_feature 1..20: note = Synthetic
  source 1..20: mol_type = other RNA
agagcgtggcgtgggccatg

SEQ ID NO: 582 - RNA, 20 nt, synthetic construct
  misc_feature 1..20: note = Synthetic
  source 1..20: mol_type = other RNA
acctgctgcgcgccggctgg

SEQ ID NO: 583 - RNA, 20 nt, synthetic construct
  misc_feature 1..20: note = Synthetic
  source 1..20: mol_type = other RNA
tcgatgattttctgaaccat

SEQ ID NO: 584 - RNA, 20 nt, synthetic construct
  misc_feature 1..20: note = Synthetic
  source 1..20: mol_type = other RNA
gggacccacctgctgcgcgc

SEQ ID NO: 585 - RNA, 20 nt, synthetic construct
  misc_feature 1..20: note = Synthetic
  source 1..20: mol_type = other RNA
gagagcgtggcgtgggccat

SEQ ID NO: 586 - RNA, 20 nt, synthetic construct
  misc_feature 1..20: note = Synthetic
  source 1..20: mol_type = other RNA
tttgggatgaactccttgcg

SEQ ID NO: 587 - RNA, 20 nt, synthetic construct
  misc_feature 1..20: note = Synthetic
  source 1..20: mol_type = other RNA
acaaggagctcgaaggaccg

SEQ ID NO: 588 - RNA, 20 nt, synthetic construct
  misc_feature 1..20: note = Synthetic
  source 1..20: mol_type = other RNA
aatctgcaagtgttcgccat

SEQ ID NO: 589 - RNA, 20 nt, synthetic construct
  misc_feature 1..20: note = Synthetic
  source 1..20: mol_type = other RNA
agcgcgcacaaggagctcga

SEQ ID NO: 590 - RNA, 20 nt, synthetic construct
  misc_feature 1..20: note = Synthetic
  source 1..20: mol_type = other RNA
cataggcccacagtgctcca

SEQ ID NO: 591 - RNA, 20 nt, synthetic construct
  misc_feature 1..20: note = Synthetic
  source 1..20: mol_type = other RNA
cagccagggcccatcgccag

SEQ ID NO: 592 - RNA, 20 nt, synthetic construct
  misc_feature 1..20: note = Synthetic
  source 1..20: mol_type = other RNA
gtttgtttacagaccacgca

SEQ ID NO: 593 - RNA, 20 nt, synthetic construct
  misc_feature 1..20: note = Synthetic
  source 1..20: mol_type = other RNA
gctcgaaggaccggggacac

SEQ ID NO: 594 - RNA, 20 nt, synthetic construct
  misc_feature 1..20: note = Synthetic
  source 1..20: mol_type = other RNA
aggcccacagtgctccaagg

SEQ ID NO: 595 - RNA, 20 nt, synthetic construct
  misc_feature 1..20: note = Synthetic
  source 1..20: mol_type = other RNA
gcgctctcaccgctggcgat

SEQ ID NO: 596 - RNA, 20 nt, synthetic construct
  misc_feature 1..20: note = Synthetic
  source 1..20: mol_type = other RNA
gcgccatgcgctctcaccgc

SEQ ID NO: 597 - RNA, 20 nt, synthetic construct
  misc_feature 1..20: note = Synthetic
  source 1..20: mol_type = other RNA
gcacaaggagctcgaaggac

SEQ ID NO: 598 - RNA, 20 nt, synthetic construct
  misc_feature 1..20: note = Synthetic
  source 1..20: mol_type = other RNA
agctcgaaggaccggggaca

SEQ ID NO: 599 - RNA, 20 nt, synthetic construct
  misc_feature 1..20: note = Synthetic
  source 1..20: mol_type = other RNA
agcctccctgaagaacggga

SEQ ID NO: 600 - RNA, 20 nt, synthetic construct
  misc_feature 1..20: note = Synthetic
  source 1..20: mol_type = other RNA
cttggagcactgtgggccta

SEQ ID NO: 601 - RNA, 20 nt, synthetic construct
  misc_feature 1..20: note = Synthetic
  source 1..20: mol_type = other RNA
cacaaggagctcgaaggacc

SEQ ID NO: 602 - RNA, 20 nt, synthetic construct
  misc_feature 1..20: note = Synthetic
  source 1..20: mol_type = other RNA
acttccaccttggagcactg

SEQ ID NO: 603 - RNA, 20 nt, synthetic construct
  misc_feature 1..20: note = Synthetic
  source 1..20: mol_type = other RNA
tggagcactgcgggcctgcg

SEQ ID NO: 604 - RNA, 20 nt, synthetic construct
  misc_feature 1..20: note = Synthetic
  source 1..20: mol_type = other RNA
aggagctctcaccgctggcg

SEQ ID NO: 605 - RNA, 20 nt, synthetic construct
  misc_feature 1..20: note = Synthetic
  source 1..20: mol_type = other RNA
gagctctcaccgctggcgag

SEQ ID NO: 606 - RNA, 20 nt, synthetic construct
  misc_feature 1..20: note = Synthetic
  source 1..20: mol_type = other RNA
ccgccggggcccctcgccag

SEQ ID NO: 607 - RNA, 20 nt, synthetic construct
  misc_feature 1..20: note = Synthetic
  source 1..20: mol_type = other RNA
cgcaggcccgcagtgctcca

SEQ ID NO: 608 - RNA, 20 nt, synthetic construct
  misc_feature 1..20: note = Synthetic
  source 1..20: mol_type = other RNA
acacgggccgcgcggctgga

SEQ ID NO: 609 - RNA, 20 nt, synthetic construct
  misc_feature 1..20: note = Synthetic
  source 1..20: mol_type = other RNA
gcccgaaggacccgggacac

SEQ ID NO: 610 - RNA, 20 nt, synthetic construct
  misc_feature 1..20: note = Synthetic
  source 1..20: mol_type = other RNA
agcgcgcacaaggagcccga

SEQ ID NO: 611 - RNA, 20 nt, synthetic construct
  misc_feature 1..20: note = Synthetic
  source 1..20: mol_type = other RNA
cttggagcactgcgggcctg

SEQ ID NO: 612 - RNA, 20 nt, synthetic construct
  misc_feature 1..20: note = Synthetic
  source 1..20: mol_type = other RNA
aggcccgcagtgctccaagg

SEQ ID NO: 613 - RNA, 20 nt, synthetic construct
  misc_feature 1..20: note = Synthetic
  source 1..20: mol_type = other RNA
acaaggagcccgaaggaccc

SEQ ID NO: 614 - RNA, 20 nt, synthetic construct
  misc_feature 1..20: note = Synthetic
  source 1..20: mol_type = other RNA
gcagtttaccaatcgttttg

SEQ ID NO: 615 - RNA, 20 nt, synthetic construct
  misc_feature 1..20: note = Synthetic
  source 1..20: mol_type = other RNA
aaactgcaggtgttccccgc

SEQ ID NO: 616 - RNA, 20 nt, synthetic construct
  misc_feature 1..20: note = Synthetic
  source 1..20: mol_type = other RNA
gtgccaggagctctcaccgc

SEQ ID NO: 617 - RNA, 20 nt, synthetic construct
  misc_feature 1..20: note = Synthetic
  source 1..20: mol_type = other RNA
caaaacgattggtaaactgc

SEQ ID NO: 618 - RNA, 20 nt, synthetic construct
  misc_feature 1..20: note = Synthetic
  source 1..20: mol_type = other RNA
agcccgaaggacccgggaca

SEQ ID NO: 619 - RNA, 20 nt, synthetic construct
  misc_feature 1..20: note = Synthetic
  source 1..20: mol_type = other RNA
cagccgcgcggcccgtgtcc

SEQ ID NO: 620 - RNA, 20 nt, synthetic construct
  misc_feature 1..20: note = Synthetic
  source 1..20: mol_type = other RNA
atttctgtgttggcgcagtg

SEQ ID NO: 621 - RNA, 20 nt, synthetic construct
  misc_feature 1..20: note = Synthetic
  source 1..20: mol_type = other RNA
ctaagttctttagcactcct

SEQ ID NO: 622 - RNA, 20 nt, synthetic construct
  misc_feature 1..20: note = Synthetic
  source 1..20: mol_type = other RNA
tgtaaacatgacttccaagc

SEQ ID NO: 623 - RNA, 20 nt, synthetic construct
  misc_feature 1..20: note = Synthetic
  source 1..20: mol_type = other RNA
caacaggtgcagttttgcca

SEQ ID NO: 624 - RNA, 20 nt, synthetic construct
  misc_feature 1..20: note = Synthetic
  source 1..20: mol_type = other RNA
caagagagccacggccagct

SEQ ID NO: 625 - RNA, 20 nt, synthetic construct
  misc_feature 1..20: note = Synthetic
  source 1..20: mol_type = other RNA
gaactgagagtgattgagag

SEQ ID NO: 626 - RNA, 20 nt, synthetic construct
  misc_feature 1..20: note = Synthetic
  source 1..20: mol_type = other RNA
catgacttccaagctggccg

SEQ ID NO: 627 - RNA, 20 nt, synthetic construct
  misc_feature 1..20: note = Synthetic
  source 1..20: mol_type = other RNA
cagagctgcagaaatcagga

SEQ ID NO: 628 - RNA, 20 nt, synthetic construct
  misc_feature 1..20: note = Synthetic
  source 1..20: mol_type = other RNA
tgatggaagagagctctgtc

SEQ ID NO: 629 - RNA, 20 nt, synthetic construct
  misc_feature 1..20: note = Synthetic
  source 1..20: mol_type = other RNA
agagctctgtctggacccca

SEQ ID NO: 630 - RNA, 20 nt, synthetic construct
  misc_feature 1..20: note = Synthetic
  source 1..20: mol_type = other RNA
aaatttggggtggaaaggtt

SEQ ID NO: 631 - RNA, 20 nt, synthetic construct
  misc_feature 1..20: note = Synthetic
  source 1..20: mol_type = other RNA
tctggaccccaaggaaaact

SEQ ID NO: 632 - RNA, 20 nt, synthetic construct
  misc_feature 1..20: note = Synthetic
  source 1..20: mol_type = other RNA
tctgcacccagttttccttg

SEQ ID NO: 633 - RNA, 20 nt, synthetic construct
  misc_feature 1..20: note = Synthetic
  source 1..20: mol_type = other RNA
gttctttgataaatttgggg

SEQ ID NO: 634 - RNA, 20 nt, synthetic construct
  misc_feature 1..20: note = Synthetic
  source 1..20: mol_type = other RNA
gaaggctgccaagagagcca

SEQ ID NO: 635 - RNA, 20 nt, synthetic construct
  misc_feature 1..20: note = Synthetic
  source 1..20: mol_type = other RNA
cacacagagctgcagaaatc

SEQ ID NO: 636 - RNA, 20 nt, synthetic construct
  misc_feature 1..20: note = Synthetic
  source 1..20: mol_type = other RNA
atttctgcagctctgtgtga

SEQ ID NO: 637 - RNA, 20 nt, synthetic construct
  misc_feature 1..20: note = Synthetic
  source 1..20: mol_type = other RNA
ttccagtccagtttgctatg

SEQ ID NO: 638 - RNA, 20 nt, synthetic construct
  misc_feature 1..20: note = Synthetic
  source 1..20: mol_type = other RNA
actgacccagaagcgtcact

SEQ ID NO: 639 - RNA, 20 nt, synthetic construct
  misc_feature 1..20: note = Synthetic
  source 1..20: mol_type = other RNA
gcgccgcaacaacatcggcc

SEQ ID NO: 640 - RNA, 20 nt, synthetic construct
  misc_feature 1..20: note = Synthetic
  source 1..20: mol_type = other RNA
gggccttaaacagtgtacgc

SEQ ID NO: 641 - RNA, 20 nt, synthetic construct
  misc_feature 1..20: note = Synthetic
  source 1..20: mol_type = other RNA
gcgaaaattttggccgatga

SEQ ID NO: 642 - RNA, 20 nt, synthetic construct
  misc_feature 1..20: note = Synthetic
  source 1..20: mol_type = other RNA
gtctcagtttctagcataca

SEQ ID NO: 643 - RNA, 20 nt, synthetic construct
  misc_feature 1..20: note = Synthetic
  source 1..20: mol_type = other RNA
gacctcatagcaaactggac

SEQ ID NO: 644 - RNA, 20 nt, synthetic construct
  misc_feature 1..20: note = Synthetic
  source 1..20: mol_type = other RNA
gatggtaagcctggcggaaa

SEQ ID NO: 645 - RNA, 20 nt, synthetic construct
  misc_feature 1..20: note = Synthetic
  source 1..20: mol_type = other RNA
atcggccaaaattttcgcca

SEQ ID NO: 646 - RNA, 20 nt, synthetic construct
  misc_feature 1..20: note = Synthetic
  source 1..20: mol_type = other RNA
tgtgagcgccgcaacaacat

SEQ ID NO: 647 - RNA, 20 nt, synthetic construct
  misc_feature 1..20: note = Synthetic
  source 1..20: mol_type = other RNA
cggatcctgcctcacacctt

SEQ ID NO: 648 - RNA, 20 nt, synthetic construct
  misc_feature 1..20: note = Synthetic
  source 1..20: mol_type = other RNA
cttgaccaagtgacgcttct

SEQ ID NO: 649 - RNA, 20 nt, synthetic construct
  misc_feature 1..20: note = Synthetic
  source 1..20: mol_type = other RNA
tgtctcagtttctagcatac

SEQ ID NO: 650 - RNA, 20 nt, synthetic construct
  misc_feature 1..20: note = Synthetic
  source 1..20: mol_type = other RNA
agcgccgcaacaacatcggc

SEQ ID NO: 651 - RNA, 20 nt, synthetic construct
  misc_feature 1..20: note = Synthetic
  source 1..20: mol_type = other RNA
gggcccggccgatgttgttg

SEQ ID NO: 652 - RNA, 20 nt, synthetic construct
  misc_feature 1..20: note = Synthetic
  source 1..20: mol_type = other RNA
acttgaccaagtgacgcttc

SEQ ID NO: 653 - RNA, 20 nt, synthetic construct
  misc_feature 1..20: note = Synthetic
  source 1..20: mol_type = other RNA
tccagtttgctatgaggtcc

SEQ ID NO: 654 - RNA, 20 nt, synthetic construct
  misc_feature 1..20: note = Synthetic
  source 1..20: mol_type = other RNA
caacaacatcggccgggccc

SEQ ID NO: 655 - RNA, 20 nt, synthetic construct
  misc_feature 1..20: note = Synthetic
  source 1..20: mol_type = other RNA
ccatggattcctcaagatcc

SEQ ID NO: 656 - RNA, 20 nt, synthetic construct
  misc_feature 1..20: note = Synthetic
  source 1..20: mol_type = other RNA
gctactggcctgcatcagtg

SEQ ID NO: 657 - RNA, 20 nt, synthetic construct
  misc_feature 1..20: note = Synthetic
  source 1..20: mol_type = other RNA
tggatgagtagacggtcctt

SEQ ID NO: 658 - RNA, 20 nt, synthetic construct
  misc_feature 1..20: note = Synthetic
  source 1..20: mol_type = other RNA
gagcccggtcgatgtgattg

SEQ ID NO: 659 - RNA, 20 nt, synthetic construct
  misc_feature 1..20: note = Synthetic
  source 1..20: mol_type = other RNA
aaggatgcccagaatctcgg

SEQ ID NO: 660 - RNA, 20 nt, synthetic construct
  misc_feature 1..20: note = Synthetic
  source 1..20: mol_type = other RNA
tgttagcccagcctgctatg

SEQ ID NO: 661 - RNA, 20 nt, synthetic construct
  misc_feature 1..20: note = Synthetic
  source 1..20: mol_type = other RNA
gatgtgattgcggcgctcac

SEQ ID NO: 662 - RNA, 20 nt, synthetic construct
  misc_feature 1..20: note = Synthetic
  source 1..20: mol_type = other RNA
gcgccgcaatcacatcgacc

SEQ ID NO: 663 - RNA, 20 nt, synthetic construct
  misc_feature 1..20: note = Synthetic
  source 1..20: mol_type = other RNA
taagatgaccagcatcacga

SEQ ID NO: 664 - RNA, 20 nt, synthetic construct
  misc_feature 1..20: note = Synthetic
  source 1..20: mol_type = other RNA
actgacccagaagcgctact

SEQ ID NO: 665 - RNA, 20 nt, synthetic construct
  misc_feature 1..20: note = Synthetic
  source 1..20: mol_type = other RNA
caggctcagcaggaatacca

SEQ ID NO: 666 - RNA, 20 nt, synthetic construct
  misc_feature 1..20: note = Synthetic
  source 1..20: mol_type = other RNA
aaggaagtcaacttctatag

SEQ ID NO: 667 - RNA, 20 nt, synthetic construct
  misc_feature 1..20: note = Synthetic
  source 1..20: mol_type = other RNA
catgtatagctagaatcttg

SEQ ID NO: 668 - RNA, 20 nt, synthetic construct
  misc_feature 1..20: note = Synthetic
  source 1..20: mol_type = other RNA
tgtggtcattatctatgccc

SEQ ID NO: 669 - RNA, 20 nt, synthetic construct
  misc_feature 1..20: note = Synthetic
  source 1..20: mol_type = other RNA
gtccttcggaaaagtaagac

SEQ ID NO: 670 - RNA, 20 nt, synthetic construct
  misc_feature 1..20: note = Synthetic
  source 1..20: mol_type = other RNA
gggccttaaacagcgtacgc

SEQ ID NO: 671 - RNA, 20 nt, synthetic construct
  misc_feature 1..20: note = Synthetic
  source 1..20: mol_type = other RNA
attggccagaagtttcgcca

SEQ ID NO: 672 - RNA, 20 nt, synthetic construct
  misc_feature 1..20: note = Synthetic
  source 1..20: mol_type = other RNA
tatacatggcttgatcagca

SEQ ID NO: 673 - RNA, 20 nt, synthetic construct
  misc_feature 1..20: note = Synthetic
  source 1..20: mol_type = other RNA
gatgtgacgccgcggcccgg

SEQ ID NO: 674 - RNA, 20 nt, synthetic construct
  misc_feature 1..20: note = Synthetic
  source 1..20: mol_type = other RNA
cggacagaagagcggccgag

SEQ ID NO: 675 - RNA, 20 nt, synthetic construct
  misc_feature 1..20: note = Synthetic
  source 1..20: mol_type = other RNA
cggctgtactgcaaaaacgg

SEQ ID NO: 676 - RNA, 20 nt, synthetic construct
  misc_feature 1..20: note = Synthetic
  source 1..20: mol_type = other RNA
gcgggtcggcactcactgtg

SEQ ID NO: 677 - RNA, 20 nt, synthetic construct
  misc_feature 1..20: note = Synthetic
  source 1..20: mol_type = other RNA
cgggtcggcactcactgtga

SEQ ID NO: 678 - RNA, 20 nt, synthetic construct
  misc_feature 1..20: note = Synthetic
  source 1..20: mol_type = other RNA
gaaatacaccagttggtatg

SEQ ID NO: 679 - RNA, 20 nt, synthetic construct
  misc_feature 1..20: note = Synthetic
  source 1..20: mol_type = other RNA
atgtggcactgaaacgaact

SEQ ID NO: 680 - RNA, 20 nt, synthetic construct
  misc_feature 1..20: note = Synthetic
  source 1..20: mol_type = other RNA
ccgggatcccgttgcaaccg

SEQ ID NO: 681 - RNA, 20 nt, synthetic construct
  misc_feature 1..20: note = Synthetic
  source 1..20: mol_type = other RNA
ttcacggatgggtgtctccg

SEQ ID NO: 682 - RNA, 20 nt, synthetic construct
  misc_feature 1..20: note = Synthetic
  source 1..20: mol_type = other RNA
attagcggacgcggtgcccg

SEQ ID NO: 683 - RNA, 20 nt, synthetic construct
  misc_feature 1..20: note = Synthetic
  source 1..20: mol_type = other RNA
gcggctgtactgcaaaaacg

SEQ ID NO: 684 - RNA, 20 nt, synthetic construct
  misc_feature 1..20: note = Synthetic
  source 1..20: mol_type = other RNA
atgtagaagatgtgacgccg

SEQ ID NO: 685 - RNA, 20 nt, synthetic construct
  misc_feature 1..20: note = Synthetic
  source 1..20: mol_type = other RNA
gggtgccagattagcggacg

SEQ ID NO: 686 - RNA, 20 nt, synthetic construct
  misc_feature 1..20: note = Synthetic
  source 1..20: mol_type = other RNA
cgggatcccgttgcaaccgc

SEQ ID NO: 687 - RNA, 20 nt, synthetic construct
  misc_feature 1..20: note = Synthetic
  source 1..20: mol_type = other RNA
cgcggttgcaacgggatccc

SEQ ID NO: 688 - RNA, 20 nt, synthetic construct
  misc_feature 1..20: note = Synthetic
  source 1..20: mol_type = other RNA
gtctccgcggacgccgcctg

SEQ ID NO: 689 - RNA, 20 nt, synthetic construct
  misc_feature 1..20: note = Synthetic
  source 1..20: mol_type = other RNA
ccccgtcaactcggccgtcg

SEQ ID NO: 690 - RNA, 20 nt, synthetic construct
  misc_feature 1..20: note = Synthetic
  source 1..20: mol_type = other RNA
gaccccgtcaactcggccgt

SEQ ID NO: 691 - RNA, 20 nt, synthetic construct
  misc_feature 1..20: note = Synthetic
  source 1..20: mol_type = other RNA
ccccgacggccgagttgacg

SEQ ID NO: 692 - RNA, 20 nt, synthetic construct
  misc_feature 1..20: note = Synthetic
  source 1..20: mol_type = other RNA
gcggtgcccgcggttgcaac

SEQ ID NO: 693 - RNA, 20 nt, synthetic construct
  misc_feature 1..20: note = Synthetic
  source 1..20: mol_type = other RNA
aagagcggccgagcggctcg

SEQ ID NO: 694 - RNA, 20 nt, synthetic construct
  misc_feature 1..20: note = Synthetic
  source 1..20: mol_type = other RNA
gctgccgccatcctcgggca

SEQ ID NO: 695 - RNA, 20 nt, synthetic construct
  misc_feature 1..20: note = Synthetic
  source 1..20: mol_type = other RNA
tccgctaatctggcacccgc

SEQ ID NO: 696 - RNA, 20 nt, synthetic construct
  misc_feature 1..20: note = Synthetic
  source 1..20: mol_type = other RNA
ccgcggttgcaacgggatcc

SEQ ID NO: 697 - RNA, 20 nt, synthetic construct
  misc_feature 1..20: note = Synthetic
  source 1..20: mol_type = other RNA
gggacctggggttcacggat

SEQ ID NO: 698 - RNA, 20 nt, synthetic construct
  misc_feature 1..20: note = Synthetic
  source 1..20: mol_type = other RNA
gacacccatccgtgaacccc

SEQ ID NO: 699 - RNA, 20 nt, synthetic construct
  misc_feature 1..20: note = Synthetic
  source 1..20: mol_type = other RNA
ttttgcagtacagccgcttg

SEQ ID NO: 700 - RNA, 20 nt, synthetic construct
  misc_feature 1..20: note = Synthetic
  source 1..20: mol_type = other RNA
ttcctgcgcatccaccccga

SEQ ID NO: 701 - RNA, 20 nt, synthetic construct
  misc_feature 1..20: note = Synthetic
  source 1..20: mol_type = other RNA
cggccgagttgacggggtcc

SEQ ID NO: 702 - RNA, 20 nt, synthetic construct
  misc_feature 1..20: note = Synthetic
  source 1..20: mol_type = other RNA
tatgtggcactgaaacgaac

SEQ ID NO: 703 - RNA, 20 nt, synthetic construct
  misc_feature 1..20: note = Synthetic
  source 1..20: mol_type = other RNA
cccggcgggtgccagattag

SEQ ID NO: 704 - RNA, 20 nt, synthetic construct
  misc_feature 1..20: note = Synthetic
  source 1..20: mol_type = other RNA
cgccggctcgccgcgcacca

SEQ ID NO: 705 - RNA, 20 nt, synthetic construct
  misc_feature 1..20: note = Synthetic
  source 1..20: mol_type = other RNA
gccggctcgccgcgcaccag

SEQ ID NO: 706 - RNA, 20 nt, synthetic construct
  misc_feature 1..20: note = Synthetic
  source 1..20: mol_type = other RNA
tcggccgctcttctgtccgc

SEQ ID NO: 707 - RNA, 20 nt, synthetic construct
  misc_feature 1..20: note = Synthetic
  source 1..20: mol_type = other RNA
cgtcaactcggccgtcgggg

SEQ ID NO: 708 - RNA, 20 nt, synthetic construct
  misc_feature 1..20: note = Synthetic
  source 1..20: mol_type = other RNA
acggccgagttgacggggtc

SEQ ID NO: 709 - RNA, 20 nt, synthetic construct
  misc_feature 1..20: note = Synthetic
  source 1..20: mol_type = other RNA
cgaactgggcagtataaact

SEQ ID NO: 710 - RNA, 20 nt, synthetic construct
  misc_feature 1..20: note = Synthetic
  source 1..20: mol_type = other RNA
atctggcacccgccgggccg

SEQ ID NO: 711 - RNA, 20 nt, synthetic construct
  misc_feature 1..20: note = Synthetic
  source 1..20: mol_type = other RNA
accccgtcaactcggccgtc

SEQ ID NO: 712 - RNA, 20 nt, synthetic construct
  misc_feature 1..20: note = Synthetic
  source 1..20: mol_type = other RNA
tctcccggaccccgtcaact

SEQ ID NO: 713 - RNA, 20 nt, synthetic construct
  misc_feature 1..20: note = Synthetic
  source 1..20: mol_type = other RNA
caccccgacggccgagttga

SEQ ID NO: 714 - RNA, 20 nt, synthetic construct
  misc_feature 1..20: note = Synthetic
  source 1..20: mol_type = other RNA
accccgacggccgagttgac

SEQ ID NO: 715 - RNA, 20 nt, synthetic construct
  misc_feature 1..20: note = Synthetic
  source 1..20: mol_type = other RNA
gaagatgtgacgccgcggcc

SEQ ID NO: 716 - RNA, 20 nt, synthetic construct
  misc_feature 1..20: note = Synthetic
  source 1..20: mol_type = other RNA
ccgctaatctggcacccgcc

SEQ ID NO: 717 - RNA, 20 nt, synthetic construct
  misc_feature 1..20: note = Synthetic
  source 1..20: mol_type = other RNA
cgcggtgcccgcggttgcaa

SEQ ID NO: 718 - RNA, 20 nt, synthetic construct
  misc_feature 1..20: note = Synthetic
  source 1..20: mol_type = other RNA
ctctccccaggcggcgtccg

SEQ ID NO: 719 - RNA, 20 nt, synthetic construct
  misc_feature 1..20: note = Synthetic
  source 1..20: mol_type = other RNA
cggccgagcggctcgaggct

SEQ ID NO: 720 - RNA, 20 nt, synthetic construct
  misc_feature 1..20: note = Synthetic
  source 1..20: mol_type = other RNA
gccgcttggggtccttgaag

SEQ ID NO: 721 - RNA, 20 nt, synthetic construct
  misc_feature 1..20: note = Synthetic
  source 1..20: mol_type = other RNA
tgtggtgaatgtcccgtgcg

SEQ ID NO: 722 - RNA, 20 nt, synthetic construct
  misc_feature 1..20: note = Synthetic
  source 1..20: mol_type = other RNA
tgaggaatgatcccattcgg

SEQ ID NO: 723 - RNA, 20 nt, synthetic construct
  misc_feature 1..20: note = Synthetic
  source 1..20: mol_type = other RNA
ccagtggctaaagcacatcg

SEQ ID NO: 724 - RNA, 20 nt, synthetic construct
  misc_feature 1..20: note = Synthetic
  source 1..20: mol_type = other RNA
caaccgcacccgcatcacag

SEQ ID NO: 725 - RNA, 20 nt, synthetic construct
  misc_feature 1..20: note = Synthetic
  source 1..20: mol_type = other RNA
gcatggttgaccgttctgga

SEQ ID NO: 726 - RNA, 20 nt, synthetic construct
  misc_feature 1..20: note = Synthetic
  source 1..20: mol_type = other RNA
gtgaagctaaccagtctgcg

SEQ ID NO: 727 - RNA, 20 nt, synthetic construct
  misc_feature 1..20: note = Synthetic
  source 1..20: mol_type = other RNA
gaactccacgttgctaccca

SEQ ID NO: 728 - RNA, 20 nt, synthetic construct
  misc_feature 1..20: note = Synthetic
  source 1..20: mol_type = other RNA
aggaaaccatccatggtcga

SEQ ID NO: 729 - RNA, 20 nt, synthetic construct
  misc_feature 1..20: note = Synthetic
  source 1..20: mol_type = other RNA
gagctctacgtgctcctcag

SEQ ID NO: 730 - RNA, 20 nt, synthetic construct
  misc_feature 1..20: note = Synthetic
  source 1..20: mol_type = other RNA
ggaagacctggaccgcatcg

SEQ ID NO: 731 - RNA, 20 nt, synthetic construct
  misc_feature 1..20: note = Synthetic
  source 1..20: mol_type = other RNA
ttcctccaaggaaaccggtg

SEQ ID NO: 732 - RNA, 20 nt, synthetic construct
  misc_feature 1..20: note = Synthetic
  source 1..20: mol_type = other RNA
ggcccagcagccatcgacca

SEQ ID NO: 733 - RNA, 20 nt, synthetic construct
  misc_feature 1..20: note = Synthetic
  source 1..20: mol_type = other RNA
gcgcctctactgcatggatg

SEQ ID NO: 734 - RNA, 20 nt, synthetic construct
  misc_feature 1..20: note = Synthetic
  source 1..20: mol_type = other RNA
atactccacgatgacataca

SEQ ID NO: 735 - RNA, 20 nt, synthetic construct
  misc_feature 1..20: note = Synthetic
  source 1..20: mol_type = other RNA
acccaaccgtgtgaccaaag

SEQ ID NO: 736 - RNA, 20 nt, synthetic construct
  misc_feature 1..20: note = Synthetic
  source 1..20: mol_type = other RNA
cgcaggggagtatacgtgct

SEQ ID NO: 737 - RNA, 20 nt, synthetic construct
  misc_feature 1..20: note = Synthetic
  source 1..20: mol_type = other RNA
gaaggagaccactgtctcgg

SEQ ID NO: 738 - RNA, 20 nt, synthetic construct
  misc_feature 1..20: note = Synthetic
  source 1..20: mol_type = other RNA
gttgcccgccaacaaaacag

SEQ ID NO: 739 - RNA, 20 nt, synthetic construct
  misc_feature 1..20: note = Synthetic
  source 1..20: mol_type = other RNA
accggcccatcctgcaagca

SEQ ID NO: 740 - RNA, 20 nt, synthetic construct
  misc_feature 1..20: note = Synthetic
  source 1..20: mol_type = other RNA
ttttcaaccagcgcagtgtg

SEQ ID NO: 741 - RNA, 20 nt, synthetic construct
  misc_feature 1..20: note = Synthetic
  source 1..20: mol_type = other RNA
cagcagccatcgaccatgga

SEQ ID NO: 742 - RNA, 20 nt, synthetic construct
  misc_feature 1..20: note = Synthetic
  source 1..20: mol_type = other RNA
atccatgcagtagaggcgct

SEQ ID NO: 743 - RNA, 20 nt, synthetic construct
  misc_feature 1..20: note = Synthetic
  source 1..20: mol_type = other RNA
tgcccagcgcctctactgca

SEQ ID NO: 744 - RNA, 20 nt, synthetic construct
  misc_feature 1..20: note = Synthetic
  source 1..20: mol_type = other RNA
atcgtggagtatgcctccaa

SEQ ID NO: 745 - RNA, 20 nt, synthetic construct
  misc_feature 1..20: note = Synthetic
  source 1..20: mol_type = other RNA
gagcatccctctgcgcagac

SEQ ID NO: 746 - RNA, 20 nt, synthetic construct
  misc_feature 1..20: note = Synthetic
  source 1..20: mol_type = other RNA
atactcccctgcgtcctcaa

SEQ ID NO: 747 - RNA, 20 nt, synthetic construct
  misc_feature 1..20: note = Synthetic
  source 1..20: mol_type = other RNA
caacgtggagttcatgtgta

SEQ ID NO: 748 - RNA, 20 nt, synthetic construct
  misc_feature 1..20: note = Synthetic
  source 1..20: mol_type = other RNA
ggtgtagttgcccttgtcag

SEQ ID NO: 749 - RNA, 20 nt, synthetic construct
  misc_feature 1..20: note = Synthetic
  source 1..20: mol_type = other RNA
atttttcaaccagcgcagtg

SEQ ID NO: 750 - RNA, 20 nt, synthetic construct
  misc_feature 1..20: note = Synthetic
  source 1..20: mol_type = other RNA
aagcatctcaccgaaatccc

SEQ ID NO: 751 - RNA, 20 nt, synthetic construct
  misc_feature 1..20: note = Synthetic
  source 1..20: mol_type = other RNA
tccccgaccttgcctgaaca

SEQ ID NO: 752 - RNA, 20 nt, synthetic construct
  misc_feature 1..20: note = Synthetic
  source 1..20: mol_type = other RNA
cggcctagcggtgcagagtg

SEQ ID NO: 753 - RNA, 20 nt, synthetic construct
  misc_feature 1..20: note = Synthetic
  source 1..20: mol_type = other RNA
gtttcctccaaggaaaccgg

SEQ ID NO: 754 - RNA, 20 nt, synthetic construct
  misc_feature 1..20: note = Synthetic
  source 1..20: mol_type = other RNA
agcgcctctactgcatggat

SEQ ID NO: 755 - RNA, 20 nt, synthetic construct
  misc_feature 1..20: note = Synthetic
  source 1..20: mol_type = other RNA
catttgcaggtggtctttcg

SEQ ID NO: 756 - RNA, 20 nt, synthetic construct
  misc_feature 1..20: note = Synthetic
  source 1..20: mol_type = other RNA
tagcagactttggcctcgca

SEQ ID NO: 757 - RNA, 20 nt, synthetic construct
  misc_feature 1..20: note = Synthetic
  source 1..20: mol_type = other RNA
tactccacgatgacatacaa

SEQ ID NO: 758 - RNA, 20 nt, synthetic construct
  misc_feature 1..20: note = Synthetic
  source 1..20: mol_type = other RNA
tcagagacccctgctagcat

SEQ ID NO: 759 - RNA, 20 nt, synthetic construct
  misc_feature 1..20: note = Synthetic
  source 1..20: mol_type = other RNA
gatgaccgaccccaccatgc

SEQ ID NO: 760 - RNA, 20 nt, synthetic construct
  misc_feature 1..20: note = Synthetic
  source 1..20: mol_type = other RNA
agtgtctcacgcatacggtt

SEQ ID NO: 761 - RNA, 20 nt, synthetic construct
  misc_feature 1..20: note = Synthetic
  source 1..20: mol_type = other RNA
cagccacactctgcaccgct

SEQ ID NO: 762 - RNA, 20 nt, synthetic construct
  misc_feature 1..20: note = Synthetic
  source 1..20: mol_type = other RNA
gaagacggaatcctcccctg

SEQ ID NO: 763 - RNA, 20 nt, synthetic construct
  misc_feature 1..20: note = Synthetic
  source 1..20: mol_type = other RNA
tcctcgggcttacagctcgt

SEQ ID NO: 764 - RNA, 20 nt, synthetic construct
  misc_feature 1..20: note = Synthetic
  source 1..20: mol_type = other RNA
gatccggtcaaataatgcct

SEQ ID NO: 765 - RNA, 20 nt, synthetic construct
  misc_feature 1..20: note = Synthetic
  source 1..20: mol_type = other RNA
aggtcccttgtatgtcatcg

SEQ ID NO: 766 - RNA, 20 nt, synthetic construct
  misc_feature 1..20: note = Synthetic
  source 1..20: mol_type = other RNA
aagtattattacctgtcccg

SEQ ID NO: 767 - RNA, 20 nt, synthetic construct
  misc_feature 1..20: note = Synthetic
  source 1..20: mol_type = other RNA
gtgggactcccatgctagca

SEQ ID NO: 768 - RNA, 20 nt, synthetic construct
  misc_feature 1..20: note = Synthetic
  source 1..20: mol_type = other RNA
ttggtttgttccagcattcg

SEQ ID NO: 769 - RNA, 20 nt, synthetic construct
  misc_feature 1..20: note = Synthetic
  source 1..20: mol_type = other RNA
atggtggtagtagcaaccaa

SEQ ID NO: 770 - RNA, 20 nt, synthetic construct
  misc_feature 1..20: note = Synthetic
  source 1..20: mol_type = other RNA
tatgtaatgcagcagccgtg

SEQ ID NO: 771 - RNA, 20 nt, synthetic construct
  misc_feature 1..20: note = Synthetic
  source 1..20: mol_type = other RNA
ggtagtagcaaccaacggga

SEQ ID NO: 772 - RNA, 20 nt, synthetic construct
  misc_feature 1..20: note = Synthetic
  source 1..20: mol_type = other RNA
ggccatcgccaatgactcag

SEQ ID NO: 773 - RNA, 20 nt, synthetic construct
  misc_feature 1..20: note = Synthetic
  source 1..20: mol_type = other RNA
tggtggtagtagcaaccaac

SEQ ID NO: 774 - RNA, 20 nt, synthetic construct
  misc_feature 1..20: note = Synthetic
  source 1..20: mol_type = other RNA
cttcttcagaaccttcccgt

SEQ ID NO: 775 - RNA, 20 nt, synthetic construct
  misc_feature 1..20: note = Synthetic
  source 1..20: mol_type = other RNA
agctatggcccactccatga

SEQ ID NO: 776 - RNA, 20 nt, synthetic construct
  misc_feature 1..20: note = Synthetic
  source 1..20: mol_type = other RNA
agccgtgaggtactgatcat

SEQ ID NO: 777 - RNA, 20 nt, synthetic construct
  misc_feature 1..20: note = Synthetic
  source 1..20: mol_type = other RNA
gagatacccaaaaccatcac

SEQ ID NO: 778 - RNA, 20 nt, synthetic construct
  misc_feature 1..20: note = Synthetic
  source 1..20: mol_type = other RNA
ctcgaattatactttgattg

SEQ ID NO: 779 - RNA, 20 nt, synthetic construct
  misc_feature 1..20: note = Synthetic
  source 1..20: mol_type = other RNA
gatactggaaaaccaggcgt

SEQ ID NO: 780 - RNA, 20 nt, synthetic construct
  misc_feature 1..20: note = Synthetic
  source 1..20: mol_type = other RNA
tttgattgagggcgtcattc

SEQ ID NO: 781 - RNA, 20 nt, synthetic construct
  misc_feature 1..20: note = Synthetic
  source 1..20: mol_type = other RNA
gctctccttgaaggtaagct

SEQ ID NO: 782 - RNA, 20 nt, synthetic construct
  misc_feature 1..20: note = Synthetic
  source 1..20: mol_type = other RNA
tgagactccagacctacgcc

SEQ ID NO: 783 - RNA, 20 nt, synthetic construct
  misc_feature 1..20: note = Synthetic
  source 1..20: mol_type = other RNA
gggtgcttataagtcatcaa

SEQ ID NO: 784 - RNA, 20 nt, synthetic construct
  misc_feature 1..20: note = Synthetic
  source 1..20: mol_type = other RNA
gcacccatgtcaaatttcac

SEQ ID NO: 785 - RNA, 20 nt, synthetic construct
  misc_feature 1..20: note = Synthetic
  source 1..20: mol_type = other RNA
ttcctctgagtcattggcga

SEQ ID NO: 786 - RNA, 20 nt, synthetic construct
  misc_feature 1..20: note = Synthetic
  source 1..20: mol_type = other RNA
ggctgctgcattacataatc

SEQ ID NO: 787 - RNA, 20 nt, synthetic construct
  misc_feature 1..20: note = Synthetic
  source 1..20: mol_type = other RNA
catggccacaacaactgacg

SEQ ID NO: 788 - RNA, 20 nt, synthetic construct
  misc_feature 1..20: note = Synthetic
  source 1..20: mol_type = other RNA
gtgcagttcagtgatcgtac

SEQ ID NO: 789 - RNA, 20 nt, synthetic construct
  misc_feature 1..20: note = Synthetic
  source 1..20: mol_type = other RNA
cttcgacacatgggataacg

SEQ ID NO: 790 - RNA, 20 nt, synthetic construct
  misc_feature 1..20: note = Synthetic
  source 1..20: mol_type = other RNA
gatcactgaactgcacgctc

SEQ ID NO: 791 - RNA, 20 nt, synthetic construct
  misc_feature 1..20: note = Synthetic
  source 1..20: mol_type = other RNA
ggtggtcggagattcgtagc

SEQ ID NO: 792 - RNA, 20 nt, synthetic construct
  misc_feature 1..20: note = Synthetic
  source 1..20: mol_type = other RNA
tccgaccaccactacagcaa

SEQ ID NO: 793 - RNA, 20 nt, synthetic construct
  misc_feature 1..20: note = Synthetic
  source 1..20: mol_type = other RNA
ctccgaccaccactacagca

SEQ ID NO: 794 - RNA, 20 nt, synthetic construct
  misc_feature 1..20: note = Synthetic
  source 1..20: mol_type = other RNA
gaggtgctgatgtaccagtt

SEQ ID NO: 795 - RNA, 20 nt, synthetic construct
  misc_feature 1..20: note = Synthetic
  source 1..20: mol_type = other RNA
cttatcatctttcaacacgc

SEQ ID NO: 796 - RNA, 20 nt, synthetic construct
  misc_feature 1..20: note = Synthetic
  source 1..20: mol_type = other RNA
atcactgaactgcacgctcc

SEQ ID NO: 797 - RNA, 20 nt, synthetic construct
  misc_feature 1..20: note = Synthetic
  source 1..20: mol_type = other RNA
atcatttcactggcgagctc

SEQ ID NO: 798 - RNA, 20 nt, synthetic construct
  misc_feature 1..20: note = Synthetic
  source 1..20: mol_type = other RNA
aacctatcttcttcgacaca

SEQ ID NO: 799 - RNA, 20 nt, synthetic construct
  misc_feature 1..20: note = Synthetic
  source 1..20: mol_type = other RNA
tggtgaagtcagttatatcc

SEQ ID NO: 800 - RNA, 20 nt, synthetic construct
  misc_feature 1..20: note = Synthetic
  source 1..20: mol_type = other RNA
agaggtgctgatgtaccagt

SEQ ID NO: 801 - RNA, 20 nt, synthetic construct
  misc_feature 1..20: note = Synthetic
  source 1..20: mol_type = other RNA
catctttcaacacgcaggac

SEQ ID NO: 802 - RNA, 20 nt, synthetic construct
  misc_feature 1..20: note = Synthetic
  source 1..20: mol_type = other RNA
gcaggccgcgtcagttgttg

SEQ ID NO: 803 - RNA, 20 nt, synthetic construct
  misc_feature 1..20: note = Synthetic
  source 1..20: mol_type = other RNA
agttatatcctggccgcctt

SEQ ID NO: 804 - RNA, 20 nt, synthetic construct
  misc_feature 1..20: note = Synthetic
  source 1..20: mol_type = other RNA
tgatgtaccagttggggaac

SEQ ID NO: 805 - RNA, 20 nt, synthetic construct
  misc_feature 1..20: note = Synthetic
  source 1..20: mol_type = other RNA
tgataagcccactctacagc

SEQ ID NO: 806 - RNA, 20 nt, synthetic construct
  misc_feature 1..20: note = Synthetic
  source 1..20: mol_type = other RNA
ttcaggacattactattgcg

SEQ ID NO: 807 - RNA, 20 nt, synthetic construct
  misc_feature 1..20: note = Synthetic
  source 1..20: mol_type = other RNA
tggggctatccgctggtcag

SEQ ID NO: 808 - RNA, 20 nt, synthetic construct
  misc_feature 1..20: note = Synthetic
  source 1..20: mol_type = other RNA
gtgtaaagtcccctgaccag

SEQ ID NO: 809 - RNA, 20 nt, synthetic construct
  misc_feature 1..20: note = Synthetic
  source 1..20: mol_type = other RNA
tggtcaggggactttacaca

SEQ ID NO: 810 - RNA, 20 nt, synthetic construct
  misc_feature 1..20: note = Synthetic
  source 1..20: mol_type = other RNA
atggggctatccgctggtca

SEQ ID NO: 811 - RNA, 20 nt, synthetic construct
  misc_feature 1..20: note = Synthetic
  source 1..20: mol_type = other RNA
accacatgccagtccagcga

SEQ ID NO: 812 - RNA, 20 nt, synthetic construct
  misc_feature 1..20: note = Synthetic
  source 1..20: mol_type = other RNA
acttctccatgctacccgag

SEQ ID NO: 813 - RNA, 20 nt, synthetic construct
  misc_feature 1..20: note = Synthetic
  source 1..20: mol_type = other RNA
tggaagggatgactacgttg

SEQ ID NO: 814 - RNA, 20 nt, synthetic construct
  misc_feature 1..20: note = Synthetic
  source 1..20: mol_type = other RNA
agaaacatggggctatccgc

SEQ ID NO: 815 - RNA, 20 nt, synthetic construct
  misc_feature 1..20: note = Synthetic
  source 1..20: mol_type = other RNA
gaaggtgaccgtcgctggac

SEQ ID NO: 816 - RNA, 20 nt, synthetic construct
  misc_feature 1..20: note = Synthetic
  source 1..20: mol_type = other RNA
aagcagaaactacccgttgc

SEQ ID NO: 817 - RNA, 20 nt, synthetic construct
  misc_feature 1..20: note = Synthetic
  source 1..20: mol_type = other RNA
gcaagcaatatcctattacc

SEQ ID NO: 818 - RNA, 20 nt, synthetic construct
  misc_feature 1..20: note = Synthetic
  source 1..20: mol_type = other RNA
gagcccagctaatgagacaa

SEQ ID NO: 819 - RNA, 20 nt, synthetic construct
  misc_feature 1..20: note = Synthetic
  source 1..20: mol_type = other RNA
ctggtcaggggactttacac

SEQ ID NO: 820 - RNA, 20 nt, synthetic construct
  misc_feature 1..20: note = Synthetic
  source 1..20: mol_type = other RNA
gaggcttgttctgtagatac

SEQ ID NO: 821 - RNA, 20 nt, synthetic construct
  misc_feature 1..20: note = Synthetic
  source 1..20: mol_type = other RNA
caagcaatatcctattaccc

SEQ ID NO: 822 - RNA, 20 nt, synthetic construct
  misc_feature 1..20: note = Synthetic
  source 1..20: mol_type = other RNA
atacagtatatatgcgtcat

SEQ ID NO: 823 - RNA, 20 nt, synthetic construct
  misc_feature 1..20: note = Synthetic
  source 1..20: mol_type = other RNA
tagatgaaggtgaccgtcgc

SEQ ID NO: 824 - RNA, 20 nt, synthetic construct
  misc_feature 1..20: note = Synthetic
  source 1..20: mol_type = other RNA
catggggctatccgctggtc

SEQ ID NO: 825 - RNA, 20 nt, synthetic construct
  misc_feature 1..20: note = Synthetic
  source 1..20: mol_type = other RNA
gagaggctcacgtgcctctc

SEQ ID NO: 826 - RNA, 20 nt, synthetic construct
  misc_feature 1..20: note = Synthetic
  source 1..20: mol_type = other RNA
gacattactattgcgtggta

SEQ ID NO: 827 - RNA, 20 nt, synthetic construct
  misc_feature 1..20: note = Synthetic
  source 1..20: mol_type = other RNA
tatggaagggatgactacgt

SEQ ID NO: 828 - RNA, 20 nt, synthetic construct
  misc_feature 1..20: note = Synthetic
  source 1..20: mol_type = other RNA
atggaagggatgactacgtt

SEQ ID NO: 829 - RNA, 20 nt, synthetic construct
  misc_feature 1..20: note = Synthetic
  source 1..20: mol_type = other RNA
tagtggctggtgacagtaac

SEQ ID NO: 830 - RNA, 20 nt, synthetic construct
  misc_feature 1..20: note = Synthetic
  source 1..20: mol_type = other RNA
ctacccgttgcaggagacgg

SEQ ID NO: 831 - RNA, 20 nt, synthetic construct
  misc_feature 1..20: note = Synthetic
  source 1..20: mol_type = other RNA
agtaagcaatgtcactcaac

SEQ ID NO: 832 - RNA, 20 nt, synthetic construct
  misc_feature 1..20: note = Synthetic
  source 1..20: mol_type = other RNA
aatagtcttcccctagcact

SEQ ID NO: 833 - RNA, 20 nt, synthetic construct
  misc_feature 1..20: note = Synthetic
  source 1..20: mol_type = other RNA
cacgtgcctctcgggtagca

SEQ ID NO: 834 - RNA, 20 nt, synthetic construct
  misc_feature 1..20: note = Synthetic
  source 1..20: mol_type = other RNA
cctgaatcctccaccttagc

SEQ ID NO: 835 - RNA, 20 nt, synthetic construct
  misc_feature 1..20: note = Synthetic
  source 1..20: mol_type = other RNA
aattctattacccgggtaat

SEQ ID NO: 836 - RNA, 20 nt, synthetic construct
  misc_feature 1..20: note = Synthetic
  source 1..20: mol_type = other RNA
gggtagtttctgcttaaata

SEQ ID NO: 837 - RNA, 20 nt, synthetic construct
  misc_feature 1..20: note = Synthetic
  source 1..20: mol_type = other RNA
agttgagtgacattgcttac

SEQ ID NO: 838 - RNA, 20 nt, synthetic construct
  misc_feature 1..20: note = Synthetic
  source 1..20: mol_type = other RNA
taatagtcttcccctagcac

SEQ ID NO: 839 - RNA, 20 nt, synthetic construct
  misc_feature 1..20: note = Synthetic
  source 1..20: mol_type = other RNA
ttaatgaatttaatcgattc

SEQ ID NO: 840 - RNA, 20 nt, synthetic construct
  misc_feature 1..20: note = Synthetic
  source 1..20: mol_type = other RNA
gtctggatcacgttcaaagg

SEQ ID NO: 841 - RNA, 20 nt, synthetic construct
  misc_feature 1..20: note = Synthetic
  source 1..20: mol_type = other RNA
atagtcggtttgacactgga

SEQ ID NO: 842 - RNA, 20 nt, synthetic construct
  misc_feature 1..20: note = Synthetic
  source 1..20: mol_type = other RNA
actggggactagacaccatg

SEQ ID NO: 843 - RNA, 20 nt, synthetic construct
  misc_feature 1..20: note = Synthetic
  source 1..20: mol_type = other RNA
ccagaacgctgcgatgactg

SEQ ID NO: 844 - RNA, 20 nt, synthetic construct
  misc_feature 1..20: note = Synthetic
  source 1..20: mol_type = other RNA
cattctccaaaactccacgg

SEQ ID NO: 845 - RNA, 20 nt, synthetic construct
  misc_feature 1..20: note = Synthetic
  source 1..20: mol_type = other RNA
gacgttgatgttgccccgag

SEQ ID NO: 846 - RNA, 20 nt, synthetic construct
  misc_feature 1..20: note = Synthetic
  source 1..20: mol_type = other RNA
cggtctagcagtgatgagca

SEQ ID NO: 847 - RNA, 20 nt, synthetic construct
  misc_feature 1..20: note = Synthetic
  source 1..20: mol_type = other RNA
ccttactaatgcggttctcg

SEQ ID NO: 848 - RNA, 20 nt, synthetic construct
  misc_feature 1..20: note = Synthetic
  source 1..20: mol_type = other RNA
ctagaaaatatggcctctcg

SEQ ID NO: 849 - RNA, 20 nt, synthetic construct
  misc_feature 1..20: note = Synthetic
  source 1..20: mol_type = other RNA
agtgatagtcggtttgacac

SEQ ID NO: 850 - RNA, 20 nt, synthetic construct
  misc_feature 1..20: note = Synthetic
  source 1..20: mol_type = other RNA
tctgatggattctcgcaatg

SEQ ID NO: 851 - RNA, 20 nt, synthetic construct
  misc_feature 1..20: note = Synthetic
  source 1..20: mol_type = other RNA
tttgtattactgaccctccg

SEQ ID NO: 852 - RNA, 20 nt, synthetic construct
  misc_feature 1..20: note = Synthetic
  source 1..20: mol_type = other RNA
agccccaactacgtgctcca

SEQ ID NO: 853 - RNA, 20 nt, synthetic construct
  misc_feature 1..20: note = Synthetic
  source 1..20: mol_type = other RNA
gcacaatgtccaagcaccga

SEQ ID NO: 854 - RNA, 20 nt, synthetic construct
  misc_feature 1..20: note = Synthetic
  source 1..20: mol_type = other RNA
agtgggcacttgatgcgagc

SEQ ID NO: 855 - RNA, 20 nt, synthetic construct
  misc_feature 1..20: note = Synthetic
  source 1..20: mol_type = other RNA
atcaggctaccttaacatgc

SEQ ID NO: 856 - RNA, 20 nt, synthetic construct
  misc_feature 1..20: note = Synthetic
  source 1..20: mol_type = other RNA
ggagctactcattccctgta

SEQ ID NO: 857 - RNA, 20 nt, synthetic construct
  misc_feature 1..20: note = Synthetic
  source 1..20: mol_type = other RNA
ttgatgtcaccattaacgaa

SEQ ID NO: 858 - RNA, 20 nt, synthetic construct
  misc_feature 1..20: note = Synthetic
  source 1..20: mol_type = other RNA
ttgaccgagacagtctgcct

SEQ ID NO: 859 - RNA, 20 nt, synthetic construct
  misc_feature 1..20: note = Synthetic
  source 1..20: mol_type = other RNA
ggcacaatgtccaagcaccg

SEQ ID NO: 860 - RNA, 20 nt, synthetic construct
  misc_feature 1..20: note = Synthetic
  source 1..20: mol_type = other RNA
cagctggccttactctgatc

SEQ ID NO: 861 - RNA, 20 nt, synthetic construct
  misc_feature 1..20: note = Synthetic
  source 1..20: mol_type = other RNA
tactaatgcggttctcgggg

SEQ ID NO: 862 - RNA, 20 nt, synthetic construct
  misc_feature 1..20: note = Synthetic
  source 1..20: mol_type = other RNA
aaactaaaatagaccgtaca

SEQ ID NO: 863 - RNA, 20 nt, synthetic construct
  misc_feature 1..20: note = Synthetic
  source 1..20: mol_type = other RNA
gatctggtattggactaggc

SEQ ID NO: 864 - RNA, 20 nt, synthetic construct
  misc_feature 1..20: note = Synthetic
  source 1..20: mol_type = other RNA
accgactatcacttggtata

SEQ ID NO: 865 - RNA, 20 nt, synthetic construct
  misc_feature 1..20: note = Synthetic
  source 1..20: mol_type = other RNA
attctccaaaactccacgga

SEQ ID NO: 866 - RNA, 20 nt, synthetic construct
  misc_feature 1..20: note = Synthetic
  source 1..20: mol_type = other RNA
ttccctggagcacgtagttg

SEQ ID NO: 867 - RNA, 20 nt, synthetic construct
  misc_feature 1..20: note = Synthetic
  source 1..20: mol_type = other RNA
gcggtctagcagtgatgagc

SEQ ID NO: 868 - RNA, 20 nt, synthetic construct
  misc_feature 1..20: note = Synthetic
  source 1..20: mol_type = other RNA
cattgccaccaagctcattg

SEQ ID NO: 869 - RNA, 20 nt, synthetic construct
  misc_feature 1..20: note = Synthetic
  source 1..20: mol_type = other RNA
gtattggactaggcaggacc

SEQ ID NO: 870 - RNA, 20 nt, synthetic construct
  misc_feature 1..20: note = Synthetic
  source 1..20: mol_type = other RNA
taggcaggaccgggaccttg

SEQ ID NO: 871 - RNA, 20 nt, synthetic construct
  misc_feature 1..20: note = Synthetic
  source 1..20: mol_type = other RNA
tggattctcgcaatgaggtt

SEQ ID NO: 872 - RNA, 20 nt, synthetic construct
  misc_feature 1..20: note = Synthetic
  source 1..20: mol_type = other RNA
tcagtctggatcacgttcaa

SEQ ID NO: 873 - RNA, 20 nt, synthetic construct
  misc_feature 1..20: note = Synthetic
  source 1..20: mol_type = other RNA
ggtgcttggacattgtgcct

SEQ ID NO: 874 - RNA, 20 nt, synthetic construct
  misc_feature 1..20: note = Synthetic
  source 1..20: mol_type = other RNA
ggaggacttccctcggtgct

SEQ ID NO: 875 - RNA, 20 nt, synthetic construct
  misc_feature 1..20: note = Synthetic
  source 1..20: mol_type = other RNA
ccccgagaaccgcattagta

SEQ ID NO: 876 - RNA, 20 nt, synthetic construct
  misc_feature 1..20: note = Synthetic
  source 1..20: mol_type = other RNA
tatagttgccagtgtcattg

SEQ ID NO: 877 - RNA, 20 nt, synthetic construct
  misc_feature 1..20: note = Synthetic
  source 1..20: mol_type = other RNA
gacgtacgtttcatctcacc

SEQ ID NO: 878 - RNA, 20 nt, synthetic construct
  misc_feature 1..20: note = Synthetic
  source 1..20: mol_type = other RNA
gatccagactgatgtcagac

SEQ ID NO: 879 - RNA, 20 nt, synthetic construct
  misc_feature 1..20: note = Synthetic
  source 1..20: mol_type = other RNA
gggagcagggggttccaatc

SEQ ID NO: 880 - RNA, 20 nt, synthetic construct
  misc_feature 1..20: note = Synthetic
  source 1..20: mol_type = other RNA
tccagaacgctgcgatgact

SEQ ID NO: 881 - RNA, 20 nt, synthetic construct
  misc_feature 1..20: note = Synthetic
  source 1..20: mol_type = other RNA
gcaactatacctgcatgtta

SEQ ID NO: 882 - RNA, 20 nt, synthetic construct
  misc_feature 1..20: note = Synthetic
  source 1..20: mol_type = other RNA
cccatgatacctttcgttaa

SEQ ID NO: 883 - RNA, 20 nt, synthetic construct
  misc_feature 1..20: note = Synthetic
  source 1..20: mol_type = other RNA
tttgaccgagacagtctgcc

SEQ ID NO: 884 - RNA, 20 nt, synthetic construct
  misc_feature 1..20: note = Synthetic
  source 1..20: mol_type = other RNA
agttggggcttagaacaacc

SEQ ID NO: 885 - RNA, 20 nt, synthetic construct
  misc_feature 1..20: note = Synthetic
  source 1..20: mol_type = other RNA
ggttccctggagcacgtagt

SEQ ID NO: 886 - RNA, 20 nt, synthetic construct
  misc_feature 1..20: note = Synthetic
  source 1..20: mol_type = other RNA
cggtgctcacggtcattaaa

SEQ ID NO: 887 - RNA, 20 nt, synthetic construct
  misc_feature 1..20: note = Synthetic
  source 1..20: mol_type = other RNA
tcatcactgctagaccgcct

SEQ ID NO: 888 - RNA, 20 nt, synthetic construct
  misc_feature 1..20: note = Synthetic
  source 1..20: mol_type = other RNA
actgctgtgcagtcgcaccc

SEQ ID NO: 889 - RNA, 20 nt, synthetic construct
  misc_feature 1..20: note = Synthetic
  source 1..20: mol_type = other RNA
tgggctttgtaggcgagtcg

SEQ ID NO: 890 - RNA, 20 nt, synthetic construct
  misc_feature 1..20: note = Synthetic
  source 1..20: mol_type = other RNA
tgtgccggcaactttgtcca

SEQ ID NO: 891 - RNA, 20 nt, synthetic construct
  misc_feature 1..20: note = Synthetic
  source 1..20: mol_type = other RNA
gggacggcttcttaccttgg

SEQ ID NO: 892 - RNA, 20 nt, synthetic construct
  misc_feature 1..20: note = Synthetic
  source 1..20: mol_type = other RNA
gctttgtaggcgagtcgagg

SEQ ID NO: 893 - RNA, 20 nt, synthetic construct
  misc_feature 1..20: note = Synthetic
  source 1..20: mol_type = other RNA
ggaagccaaccagagtacgt

SEQ ID NO: 894 - RNA, 20 nt, synthetic construct
  misc_feature 1..20: note = Synthetic
  source 1..20: mol_type = other RNA
agttgccggcacatgctagc

SEQ ID NO: 895 - RNA, 20 nt, synthetic construct
  misc_feature 1..20: note = Synthetic
  source 1..20: mol_type = other RNA
tgatatcgcacttgtgtccg

SEQ ID NO: 896 - RNA, 20 nt, synthetic construct
  misc_feature 1..20: note = Synthetic
  source 1..20: mol_type = other RNA
gttttccaacgtactctggt

SEQ ID NO: 897 - RNA, 20 nt, synthetic construct
  misc_feature 1..20: note = Synthetic
  source 1..20: mol_type = other RNA
gatgtctgttacggtcaact

SEQ ID NO: 898 - RNA, 20 nt, synthetic construct
  misc_feature 1..20: note = Synthetic
  source 1..20: mol_type = other RNA
tgagaaggacactcgctgcc

SEQ ID NO: 899 - RNA, 20 nt, synthetic construct
  misc_feature 1..20: note = Synthetic
  source 1..20: mol_type = other RNA
gtgtccgtggacaaagttgc

SEQ ID NO: 900 - RNA, 20 nt, synthetic construct
  misc_feature 1..20: note = Synthetic
  source 1..20: mol_type = other RNA
gtaggcgagtcgaggtggaa

SEQ ID NO: 901 - RNA, 20 nt, synthetic construct
  misc_feature 1..20: note = Synthetic
  source 1..20: mol_type = other RNA
tgtaggcgagtcgaggtgga

SEQ ID NO: 902 - RNA, 20 nt, synthetic construct
  misc_feature 1..20: note = Synthetic
  source 1..20: mol_type = other RNA
acggctcgacaggaacctct

SEQ ID NO: 903 - RNA, 20 nt, synthetic construct
  misc_feature 1..20: note = Synthetic
  source 1..20: mol_type = other RNA
caagtgcgatatcaccttac

SEQ ID NO: 904 - RNA, 20 nt, synthetic construct
  misc_feature 1..20: note = Synthetic
  source 1..20: mol_type = other RNA
gattcctgaaacggctcgac

SEQ ID NO: 905 - RNA, 20 nt, synthetic construct
  misc_feature 1..20: note = Synthetic
  source 1..20: mol_type = other RNA
cgactgcacagcagttccac

SEQ ID NO: 906 - RNA, 20 nt, synthetic construct
  misc_feature 1..20: note = Synthetic
  source 1..20: mol_type = other RNA
agaagttttccaacgtactc

SEQ ID NO: 907 - RNA, 20 nt, synthetic construct
  misc_feature 1..20: note = Synthetic
  source 1..20: mol_type = other RNA
aacggctcgacaggaacctc

SEQ ID NO: 908 - RNA, 20 nt, synthetic construct
  misc_feature 1..20: note = Synthetic
  source 1..20: mol_type = other RNA
caactcggtgcacagagtct

SEQ ID NO: 909 - RNA, 20 nt, synthetic construct
  misc_feature 1..20: note = Synthetic
  source 1..20: mol_type = other RNA
ggttcctgtcgagccgtttc

SEQ ID NO: 910 - RNA, 20 nt, synthetic construct
  misc_feature 1..20: note = Synthetic
  source 1..20: mol_type = other RNA
agctgatccgattcctgaaa

SEQ ID NO: 911 - RNA, 20 nt, synthetic construct
  misc_feature 1..20: note = Synthetic
  source 1..20: mol_type = other RNA
tgtcgagccgtttcaggaat

SEQ ID NO: 912 - RNA, 20 nt, synthetic construct
  misc_feature 1..20: note = Synthetic
  source 1..20: mol_type = other RNA
attcgttctgaagaggtgag

SEQ ID NO: 913 - RNA, 20 nt, synthetic construct
  misc_feature 1..20: note = Synthetic
  source 1..20: mol_type = other RNA
caaattcggtacatcctcga

SEQ ID NO: 914 - RNA, 20 nt, synthetic construct
  misc_feature 1..20: note = Synthetic
  source 1..20: mol_type = other RNA
cattccctcaacttggtgtg

SEQ ID NO: 915 - RNA, 20 nt, synthetic construct
  misc_feature 1..20: note = Synthetic
  source 1..20: mol_type = other RNA
tcagggctgagatgccgtcg

SEQ ID NO: 916 - RNA, 20 nt, synthetic construct
  misc_feature 1..20: note = Synthetic
  source 1..20: mol_type = other RNA
cttccaatctggattcaatg

SEQ ID NO: 917 - RNA, 20 nt, synthetic construct
  misc_feature 1..20: note = Synthetic
  source 1..20: mol_type = other RNA
ggagaaggcaactggaccga

SEQ ID NO: 918 - RNA, 20 nt, synthetic construct
  misc_feature 1..20: note = Synthetic
  source 1..20: mol_type = other RNA
catctcagccctgagaaagg

SEQ ID NO: 919 - RNA, 20 nt, synthetic construct
  misc_feature 1..20: note = Synthetic
  source 1..20: mol_type = other RNA
gtacctcattgaatccagat

SEQ ID NO: 920 - RNA, 20 nt, synthetic construct
  misc_feature 1..20: note = Synthetic
  source 1..20: mol_type = other RNA
acatttgccgaagagccctc

SEQ ID NO: 921 - RNA, 20 nt, synthetic construct
  misc_feature 1..20: note = Synthetic
  source 1..20: mol_type = other RNA
acagtgtcctggacaactca

SEQ ID NO: 922 - RNA, 20 nt, synthetic construct
  misc_feature 1..20: note = Synthetic
  source 1..20: mol_type = other RNA
cacaccaagttgagggaatg

SEQ ID NO: 923 - RNA, 20 nt, synthetic construct
  misc_feature 1..20: note = Synthetic
  source 1..20: mol_type = other RNA
tcttcccccacaccaagttg

SEQ ID NO: 924 - RNA, 20 nt, synthetic construct
  misc_feature 1..20: note = Synthetic
  source 1..20: mol_type = other RNA
gtgtcctcattccctcaact

SEQ ID NO: 925 - RNA, 20 nt, synthetic construct
  misc_feature 1..20: note = Synthetic
  source 1..20: mol_type = other RNA
gacagtgtcctggacaactc

SEQ ID NO: 926 - RNA, 20 nt, synthetic construct
  misc_feature 1..20: note = Synthetic
  source 1..20: mol_type = other RNA
ggaaggcagcaggcaacacc

SEQ ID NO: 927 - RNA, 20 nt, synthetic construct
  misc_feature 1..20: note = Synthetic
  source 1..20: mol_type = other RNA
catgtgtgaaagcagcaaag

SEQ ID NO: 928 - RNA, 20 nt, synthetic construct
  misc_feature 1..20: note = Synthetic
  source 1..20: mol_type = other RNA
cttcccccacaccaagttga

SEQ ID NO: 929 - RNA, 20 nt, synthetic construct
  misc_feature 1..20: note = Synthetic
  source 1..20: mol_type = other RNA
cgtgactctgacctgcccgg

SEQ ID NO: 930 - RNA, 20 nt, synthetic construct
  misc_feature 1..20: note = Synthetic
  source 1..20: mol_type = other RNA
agctgccccaaagagtacgg

SEQ ID NO: 931 - RNA, 20 nt, synthetic construct
  misc_feature 1..20: note = Synthetic
  source 1..20: mol_type = other RNA
tcgaggtattgtcagacccc

SEQ ID NO: 932 - RNA, 20 nt, synthetic construct
  misc_feature 1..20: note = Synthetic
  source 1..20: mol_type = other RNA
gcgtgactctgacctgcccg

SEQ ID NO: 933 - RNA, 20 nt, synthetic construct
  misc_feature 1..20: note = Synthetic
  source 1..20: mol_type = other RNA
tcggtgcagctccacgactc

SEQ ID NO: 934 - RNA, 20 nt, synthetic construct
  misc_feature 1..20: note = Synthetic
  source 1..20: mol_type = other RNA
ctgccagttagcagtcccgg

SEQ ID NO: 935 - RNA, 20 nt, synthetic construct
  misc_feature 1..20: note = Synthetic
  source 1..20: mol_type = other RNA
gacactactggcgacgcaca

SEQ ID NO: 936 - RNA, 20 nt, synthetic construct
  misc_feature 1..20: note = Synthetic
  source 1..20: mol_type = other RNA
tgtgcgtcgccagtagtgtc

SEQ ID NO: 937 - RNA, 20 nt, synthetic construct
  misc_feature 1..20: note = Synthetic
  source 1..20: mol_type = other RNA
gtcatccacgacgcctggag

SEQ ID NO: 938 - RNA, 20 nt, synthetic construct
  misc_feature 1..20: note = Synthetic
  source 1..20: mol_type = other RNA
acgacgcctggagcggcctg

SEQ ID NO: 939 - RNA, 20 nt, synthetic construct
  misc_feature 1..20: note = Synthetic
  source 1..20: mol_type = other RNA
aatgcagaggagcgttccga

SEQ ID NO: 940 - RNA, 20 nt, synthetic construct
  misc_feature 1..20: note = Synthetic
  source 1..20: mol_type = other RNA
atctggtcggttgtggctcg

SEQ ID NO: 941 - RNA, 20 nt, synthetic construct
  misc_feature 1..20: note = Synthetic
  source 1..20: mol_type = other RNA
ctgatgtcataagggctccg

SEQ ID NO: 942 - RNA, 20 nt, synthetic construct
  misc_feature 1..20: note = Synthetic
  source 1..20: mol_type = other RNA
caccccatccctgacgacaa

SEQ ID NO: 943 - RNA, 20 nt, synthetic construct
  misc_feature 1..20: note = Synthetic
  source 1..20: mol_type = other RNA
tgccagttagcagtcccgga

SEQ ID NO: 944 - RNA, 20 nt, synthetic construct
  misc_feature 1..20: note = Synthetic
  source 1..20: mol_type = other RNA
tgcatccgccgtactctttg

SEQ ID NO: 945 - RNA, 20 nt, synthetic construct
  misc_feature 1..20: note = Synthetic
  source 1..20: mol_type = other RNA
agctcagatatcgggctgaa

SEQ ID NO: 946 - RNA, 20 nt, synthetic construct
  misc_feature 1..20: note = Synthetic
  source 1..20: mol_type = other RNA
acctgtccaaggcgtgccca

SEQ ID NO: 947 - RNA, 20 nt, synthetic construct
  misc_feature 1..20: note = Synthetic
  source 1..20: mol_type = other RNA
tcaggccgctccaggcgtcg

SEQ ID NO: 948 - RNA, 20 nt, synthetic construct
  misc_feature 1..20: note = Synthetic
  source 1..20: mol_type = other RNA
tgatgtcataagggctccgt

SEQ ID NO: 949 - RNA, 20 nt, synthetic construct
  misc_feature 1..20: note = Synthetic
  source 1..20: mol_type = other RNA
aactattcatgctaccgggc

SEQ ID NO: 950 - RNA, 20 nt, synthetic construct
  misc_feature 1..20: note = Synthetic
  source 1..20: mol_type = other RNA
cacgtgcctcaggccgctcc

SEQ ID NO: 951 - RNA, 20 nt, synthetic construct
  misc_feature 1..20: note = Synthetic
  source 1..20: mol_type = other RNA
agaggagcgttccgaaggcc

SEQ ID NO: 952 - RNA, 20 nt, synthetic construct
  misc_feature 1..20: note = Synthetic
  source 1..20: mol_type = other RNA
ggagccgtgccagtattccc

SEQ ID NO: 953 - RNA, 20 nt, synthetic construct
  misc_feature 1..20: note = Synthetic
  source 1..20: mol_type = other RNA
ctccgggactgctaactggc

SEQ ID NO: 954 - RNA, 20 nt, synthetic construct
  misc_feature 1..20: note = Synthetic
  source 1..20: mol_type = other RNA
tacggtttgagctcagatat

SEQ ID NO: 955 - RNA, 20 nt, synthetic construct
  misc_feature 1..20: note = Synthetic
  source 1..20: mol_type = other RNA
agccagcagcgcgcagccga

SEQ ID NO: 956 - RNA, 20 nt, synthetic construct
  misc_feature 1..20: note = Synthetic
  source 1..20: mol_type = other RNA
cagcctttgtcgtcagggat

SEQ ID NO: 957 - RNA, 20 nt, synthetic construct
  misc_feature 1..20: note = Synthetic
  source 1..20: mol_type = other RNA
ctccctccgggactgctaac

SEQ ID NO: 958 - RNA, 20 nt, synthetic construct
  misc_feature 1..20: note = Synthetic
  source 1..20: mol_type = other RNA
cggaggccatgggcacgcct

SEQ ID NO: 959 - RNA, 20 nt, synthetic construct
  misc_feature 1..20: note = Synthetic
  source 1..20: mol_type = other RNA
gtggacacctcgttctcagc

SEQ ID NO: 960 - RNA, 20 nt, synthetic construct
  misc_feature 1..20: note = Synthetic
  source 1..20: mol_type = other RNA
cctgcgcagggcagcgcctt

SEQ ID NO: 961 - RNA, 20 nt, synthetic construct
  misc_feature 1..20: note = Synthetic
  source 1..20: mol_type = other RNA
atgtgcgtcgccagtagtgt

SEQ ID NO: 962 - RNA, 20 nt, synthetic construct
  misc_feature 1..20: note = Synthetic
  source 1..20: mol_type = other RNA
ccgtggccagaaacccccgc

SEQ ID NO: 963 - RNA, 20 nt, synthetic construct
  misc_feature 1..20: note = Synthetic
  source 1..20: mol_type = other RNA
catgcatccgccgtactctt

SEQ ID NO: 964 - RNA, 20 nt, synthetic construct
  misc_feature 1..20: note = Synthetic
  source 1..20: mol_type = other RNA
ccacagactgtacggcaagg

SEQ ID NO: 965 - RNA, 20 nt, synthetic construct
  misc_feature 1..20: note = Synthetic
  source 1..20: mol_type = other RNA
tattctaccgtggtacacag

SEQ ID NO: 966 - RNA, 20 nt, synthetic construct
  misc_feature 1..20: note = Synthetic
  source 1..20: mol_type = other RNA
gaactactagtccttcactg

SEQ ID NO: 967 - RNA, 20 nt, synthetic construct
  misc_feature 1..20: note = Synthetic
  source 1..20: mol_type = other RNA
cactgtccagtattctaccg

SEQ ID NO: 968 - RNA, 20 nt, synthetic construct
  misc_feature 1..20: note = Synthetic
  source 1..20: mol_type = other RNA
tcttaaataggtgcgatgca

SEQ ID NO: 969 - RNA, 20 nt, synthetic construct
  misc_feature 1..20: note = Synthetic
  source 1..20: mol_type = other RNA
taagcaaacaggcacgacta

SEQ ID NO: 970 - RNA, 20 nt, synthetic construct
  misc_feature 1..20: note = Synthetic
  source 1..20: mol_type = other RNA
gtgcatcgcacctatttaag

SEQ ID NO: 971 - RNA, 20 nt, synthetic construct
  misc_feature 1..20: note = Synthetic
  source 1..20: mol_type = other RNA
ggtggaatggactactccaa

SEQ ID NO: 972 - RNA, 20 nt, synthetic construct
  misc_feature 1..20: note = Synthetic
  source 1..20: mol_type = other RNA
aactgtacaactcgtgtgga

SEQ ID NO: 973 - RNA, 20 nt, synthetic construct
  misc_feature 1..20: note = Synthetic
  source 1..20: mol_type = other RNA
gcggctacatgcctcagtga

SEQ ID NO: 974 - RNA, 20 nt, synthetic construct
  misc_feature 1..20: note = Synthetic
  source 1..20: mol_type = other RNA
agacttggactgacggaact

SEQ ID NO: 975 - RNA, 20 nt, synthetic construct
  misc_feature 1..20: note = Synthetic
  source 1..20: mol_type = other RNA
gactagtgacacattgtaca

SEQ ID NO: 976 - RNA, 20 nt, synthetic construct
  misc_feature 1..20: note = Synthetic
  source 1..20: mol_type = other RNA
aagcaccctgtatcacagac

SEQ ID NO: 977 - RNA, 20 nt, synthetic construct
  misc_feature 1..20: note = Synthetic
  source 1..20: mol_type = other RNA
acagaactgtacaactcgtg

SEQ ID NO: 978 - RNA, 20 nt, synthetic construct
  misc_feature 1..20: note = Synthetic
  source 1..20: mol_type = other RNA
gtttaggattcgctgtatga

SEQ ID NO: 979 - RNA, 20 nt, synthetic construct
  misc_feature 1..20: note = Synthetic
  source 1..20: mol_type = other RNA
cttccaaaggacctactgtt

SEQ ID NO: 980 - RNA, 20 nt, synthetic construct
  misc_feature 1..20: note = Synthetic
  source 1..20: mol_type = other RNA
tgtgtaccacggtagaatac

SEQ ID NO: 981 - RNA, 20 nt, synthetic construct
  misc_feature 1..20: note = Synthetic
  source 1..20: mol_type = other RNA
ggaccaaagatgcctcaact

SEQ ID NO: 982 - RNA, 20 nt, synthetic construct
  misc_feature 1..20: note = Synthetic
  source 1..20: mol_type = other RNA
caatgtgtcactagtcaaag

SEQ ID NO: 983 - RNA, 20 nt, synthetic construct
  misc_feature 1..20: note = Synthetic
  source 1..20: mol_type = other RNA
gccaggtatacctcttaaat

SEQ ID NO: 984 - RNA, 20 nt, synthetic construct
  misc_feature 1..20: note = Synthetic
  source 1..20: mol_type = other RNA
cctggtccatcagcatatac

SEQ ID NO: 985 - RNA, 20 nt, synthetic construct
  misc_feature 1..20: note = Synthetic
  source 1..20: mol_type = other RNA
actcggatcttgagaagact

SEQ ID NO: 986 - RNA, 20 nt, synthetic construct
  misc_feature 1..20: note = Synthetic
  source 1..20: mol_type = other RNA
tgtccgaacagtaggtcctt

SEQ ID NO: 987 - RNA, 20 nt, synthetic construct
  misc_feature 1..20: note = Synthetic
  source 1..20: mol_type = other RNA
tggacttacgagcttgttta

SEQ ID NO: 988 - RNA, 20 nt, synthetic construct
  misc_feature 1..20: note = Synthetic
  source 1..20: mol_type = other RNA
atggaggctgcgactgatga

SEQ ID NO: 989 - RNA, 20 nt, synthetic construct
  misc_feature 1..20: note = Synthetic
  source 1..20: mol_type = other RNA
cacattgtacatggtacgaa

SEQ ID NO: 990 - RNA, 20 nt, synthetic construct
  misc_feature 1..20: note = Synthetic
  source 1..20: mol_type = other RNA
cacccaaagcatgttatctt

SEQ ID NO: 991 - RNA, 20 nt, synthetic construct
  misc_feature 1..20: note = Synthetic
  source 1..20: mol_type = other RNA
ttgcctggtcctcctgactg

SEQ ID NO: 992 - RNA, 20 nt, synthetic construct
  misc_feature 1..20: note = Synthetic
  source 1..20: mol_type = other RNA
aggcgcatgtgaactccctg

SEQ ID NO: 993 - RNA, 20 nt, synthetic construct
  misc_feature 1..20: note = Synthetic
  source 1..20: mol_type = other RNA
cggagatctcgaagcatgtt

SEQ ID NO: 994 - RNA, 20 nt, synthetic construct
  misc_feature 1..20: note = Synthetic
  source 1..20: mol_type = other RNA
gaagatgtcaaactcactca

SEQ ID NO: 995 - RNA, 20 nt, synthetic construct
  misc_feature 1..20: note = Synthetic
  source 1..20: mol_type = other RNA
ggcgcatgtgaactccctgg

SEQ ID NO: 996 - RNA, 20 nt, synthetic construct
  misc_feature 1..20: note = Synthetic
  source 1..20: mol_type = other RNA
aaggcgcatgtgaactccct

SEQ ID NO: 997 - RNA, 20 nt, synthetic construct
  misc_feature 1..20: note = Synthetic
  source 1..20: mol_type = other RNA
caaggcgcatgtgaactccc

SEQ ID NO: 998 - RNA, 20 nt, synthetic construct
  misc_feature 1..20: note = Synthetic
  source 1..20: mol_type = other RNA
gcgccgtagcctcagcctga

SEQ ID NO: 999 - RNA, 20 nt, synthetic construct
  misc_feature 1..20: note = Synthetic
  source 1..20: mol_type = other RNA
ggtcttcaggttctccccca

SEQ ID NO: 1000 - RNA, 20 nt, synthetic construct
  misc_feature 1..20: note = Synthetic
  source 1..20: mol_type = other RNA
gggtcttggttctcagcttg

SEQ ID NO: 1001 - RNA, 20 nt, synthetic construct
  misc_feature 1..20: note = Synthetic
  source 1..20: mol_type = other RNA
gatgatccagttttacctgg

SEQ ID NO: 1002 - RNA, 20 nt, synthetic construct
  misc_feature 1..20: note = Synthetic
  source 1..20: mol_type = other RNA
aaactggatcatctcagaca

SEQ ID NO: 1003 - RNA, 20 nt, synthetic construct
  misc_feature 1..20: note = Synthetic
  source 1..20: mol_type = other RNA
ggatcatctcagacaaggct

SEQ ID NO: 1004 - RNA, 20 nt, synthetic construct
  misc_feature 1..20: note = Synthetic
  source 1..20: mol_type = other RNA
tcgtatcttcattgtcatgt

SEQ ID NO: 1005 - RNA, 20 nt, synthetic construct
  misc_feature 1..20: note = Synthetic
  source 1..20: mol_type = other RNA
tggccctcaccccagtcagg

SEQ ID NO: 1006 - RNA, 20 nt, synthetic construct
  misc_feature 1..20: note = Synthetic
  source 1..20: mol_type = other RNA
gaaccaagacccagacatca

SEQ ID NO: 1007 - RNA, 20 nt, synthetic construct
  misc_feature 1..20: note = Synthetic
  source 1..20: mol_type = other RNA
tcacatgcgccttgatgtct

SEQ ID NO: 1008 - RNA, 20 nt, synthetic construct
  misc_feature 1..20: note = Synthetic
  source 1..20: mol_type = other RNA
gcgccgccagcagcactacg

SEQ ID NO: 1009 - RNA, 20 nt, synthetic construct
  misc_feature 1..20: note = Synthetic
  source 1..20: mol_type = other RNA
tggcattccagggttacctg

SEQ ID NO: 1010 - RNA, 20 nt, synthetic construct
  misc_feature 1..20: note = Synthetic
  source 1..20: mol_type = other RNA
tcgcttcccgaagtaacaag

SEQ ID NO: 1011 - RNA, 20 nt, synthetic construct
  misc_feature 1..20: note = Synthetic
  source 1..20: mol_type = other RNA
gcgccgcacatacagctgga

SEQ ID NO: 1012 - RNA, 20 nt, synthetic construct
  misc_feature 1..20: note = Synthetic
  source 1..20: mol_type = other RNA
tgggtagctgaatcttcccg

SEQ ID NO: 1013 - RNA, 20 nt, synthetic construct
  misc_feature 1..20: note = Synthetic
  source 1..20: mol_type = other RNA
ctggttccactgtcccgttg

SEQ ID NO: 1014 - RNA, 20 nt, synthetic construct
  misc_feature 1..20: note = Synthetic
  source 1..20: mol_type = other RNA
gctggttccactgtcccgtt

SEQ ID NO: 1015 - RNA, 20 nt, synthetic construct
  misc_feature 1..20: note = Synthetic
  source 1..20: mol_type = other RNA
cgtcttggctcagacgctca

SEQ ID NO: 1016 - RNA, 20 nt, synthetic construct
  misc_feature 1..20: note = Synthetic
  source 1..20: mol_type = other RNA
tgcggtaaggtcataggaca

SEQ ID NO: 1017 - RNA, 20 nt, synthetic construct
  misc_feature 1..20: note = Synthetic
  source 1..20: mol_type = other RNA
gtttcccggcaccttgcgaa

SEQ ID NO: 1018 - RNA, 20 nt, synthetic construct
  misc_feature 1..20: note = Synthetic
  source 1..20: mol_type = other RNA
aggcctcctcatcaagcggg

SEQ ID NO: 1019 - RNA, 20 nt, synthetic construct
  misc_feature 1..20: note = Synthetic
  source 1..20: mol_type = other RNA
gcaagcctgcctcatcaacc

SEQ ID NO: 1020 - RNA, 20 nt, synthetic construct
  misc_feature 1..20: note = Synthetic
  source 1..20: mol_type = other RNA
cttcaaaccacacagacgga

SEQ ID NO: 1021 - RNA, 20 nt, synthetic construct
  misc_feature 1..20: note = Synthetic
  source 1..20: mol_type = other RNA
ctgcggtaaggtcataggac

SEQ ID NO: 1022 - RNA, 20 nt, synthetic construct
  misc_feature 1..20: note = Synthetic
  source 1..20: mol_type = other RNA
gtatgagattgccattcgca

SEQ ID NO: 1023 - RNA, 20 nt, synthetic construct
  misc_feature 1..20: note = Synthetic
  source 1..20: mol_type = other RNA
gattgccattcgcaaggtgc

SEQ ID NO: 1024 - RNA, 20 nt, synthetic construct
  misc_feature 1..20: note = Synthetic
  source 1..20: mol_type = other RNA
ttacttcgggaagcgacaga

SEQ ID NO: 1025 - RNA, 20 nt, synthetic construct
  misc_feature 1..20: note = Synthetic
  source 1..20: mol_type = other RNA
ctcctcatcaagcgggtgga

SEQ ID NO: 1026 - RNA, 20 nt, synthetic construct
  misc_feature 1..20: note = Synthetic
  source 1..20: mol_type = other RNA
tacgaggcacggcagcatcc

SEQ ID NO: 1027 - RNA, 20 nt, synthetic construct
  misc_feature 1..20: note = Synthetic
  source 1..20: mol_type = other RNA
gccagcagcactacgaggca

SEQ ID NO: 1028 - RNA, 20 nt, synthetic construct
  misc_feature 1..20: note = Synthetic
  source 1..20: mol_type = other RNA
gtcgcttcccgaagtaacaa

SEQ ID NO: 1029 - RNA, 20 nt, synthetic construct
  misc_feature 1..20: note = Synthetic
  source 1..20: mol_type = other RNA
gctatgaagtggcgctcctg

SEQ ID NO: 1030 - RNA, 20 nt, synthetic construct
  misc_feature 1..20: note = Synthetic
  source 1..20: mol_type = other RNA
ggtcactgcggtaaggtcat

SEQ ID NO: 1031 - RNA, 20 nt, synthetic construct
  misc_feature 1..20: note = Synthetic
  source 1..20: mol_type = other RNA
ggtccaaggtcactgcggta

SEQ ID NO: 1032 - RNA, 20 nt, synthetic construct
  misc_feature 1..20: note = Synthetic
  source 1..20: mol_type = other RNA
tcgggaagattcagctaccc

SEQ ID NO: 1033 - RNA, 20 nt, synthetic construct
  misc_feature 1..20: note = Synthetic
  source 1..20: mol_type = other RNA
tgtcgcttcccgaagtaaca

SEQ ID NO: 1034 - RNA, 20 nt, synthetic construct
  misc_feature 1..20: note = Synthetic
  source 1..20: mol_type = other RNA
acacagggtggctcggcctt

SEQ ID NO: 1035 - RNA, 20 nt, synthetic construct
  misc_feature 1..20: note = Synthetic
  source 1..20: mol_type = other RNA
gaagaatcgcccttgacaga

SEQ ID NO: 1036 - RNA, 20 nt, synthetic construct
  misc_feature 1..20: note = Synthetic
  source 1..20: mol_type = other RNA
ccaggcatctcccgaatttg

SEQ ID NO: 1037 - RNA, 20 nt, synthetic construct
  misc_feature 1..20: note = Synthetic
  source 1..20: mol_type = other RNA
cgagtcactcacttgactgc

SEQ ID NO: 1038 - RNA, 20 nt, synthetic construct
  misc_feature 1..20: note = Synthetic
  source 1..20: mol_type = other RNA
caggagcgccacttcatagc

SEQ ID NO: 1039 - RNA, 20 nt, synthetic construct
  misc_feature 1..20: note = Synthetic
  source 1..20: mol_type = other RNA
acctggtatctcctcaggta

SEQ ID NO: 1040 - RNA, 20 nt, synthetic construct
  misc_feature 1..20: note = Synthetic
  source 1..20: mol_type = other RNA
attgccattcgcaaggtgcc

SEQ ID NO: 1041 - RNA, 20 nt, synthetic construct
  misc_feature 1..20: note = Synthetic
  source 1..20: mol_type = other RNA
aagcgacagatggtttcacc

SEQ ID NO: 1042 - RNA, 20 nt, synthetic construct
  misc_feature 1..20: note = Synthetic
  source 1..20: mol_type = other RNA
cggagccctcgcctactgcc

SEQ ID NO: 1043 - RNA, 20 nt, synthetic construct
  misc_feature 1..20: note = Synthetic
  source 1..20: mol_type = other RNA
caccatccacccgcttgatg

SEQ ID NO: 1044 - RNA, 20 nt, synthetic construct
  misc_feature 1..20: note = Synthetic
  source 1..20: mol_type = other RNA
ggctggttccactgtcccgt

SEQ ID NO: 1045 - RNA, 20 nt, synthetic construct
  misc_feature 1..20: note = Synthetic
  source 1..20: mol_type = other RNA
aggagtgaccattcctcagt

SEQ ID NO: 1046 - RNA, 20 nt, synthetic construct
  misc_feature 1..20: note = Synthetic
  source 1..20: mol_type = other RNA
agctccagtcagatattccc

SEQ ID NO: 1047 - RNA, 20 nt, synthetic construct
  misc_feature 1..20: note = Synthetic
  source 1..20: mol_type = other RNA
ttggacctgtaccacagcaa

SEQ ID NO: 1048 - RNA, 20 nt, synthetic construct
  misc_feature 1..20: note = Synthetic
  source 1..20: mol_type = other RNA
tcatttgcgggggccatctt

SEQ ID NO: 1049 - RNA, 20 nt, synthetic construct
  misc_feature 1..20: note = Synthetic
  source 1..20: mol_type = other RNA
caaggtgccgggaaacttca

SEQ ID NO: 1050 - RNA, 20 nt, synthetic construct
  misc_feature 1..20: note = Synthetic
  source 1..20: mol_type = other RNA
ggcgccgcacatacagctgg

SEQ ID NO: 1051 - RNA, 20 nt, synthetic construct
  misc_feature 1..20: note = Synthetic
  source 1..20: mol_type = other RNA
catccacccgcttgatgagg

SEQ ID NO: 1052 - RNA, 20 nt, synthetic construct
  misc_feature 1..20: note = Synthetic
  source 1..20: mol_type = other RNA
tggcccggtagccattgctg

SEQ ID NO: 1053 - RNA, 20 nt, synthetic construct
  misc_feature 1..20: note = Synthetic
  source 1..20: mol_type = other RNA
tgtaccacagcaatggctac

SEQ ID NO: 1054 - RNA, 20 nt, synthetic construct
  misc_feature 1..20: note = Synthetic
  source 1..20: mol_type = other RNA
cccccaggctgacagaacgc

SEQ ID NO: 1055 - RNA, 20 nt, synthetic construct
  misc_feature 1..20: note = Synthetic
  source 1..20: mol_type = other RNA
accaggcatctcccgaattt

SEQ ID NO: 1056 - RNA, 20 nt, synthetic construct
  misc_feature 1..20: note = Synthetic
  source 1..20: mol_type = other RNA
tcacagctcagtacctaagg

SEQ ID NO: 1057 - RNA, 20 nt, synthetic construct
  misc_feature 1..20: note = Synthetic
  source 1..20: mol_type = other RNA
tgagaaatcacattccgtca

SEQ ID NO: 1058 - RNA, 20 nt, synthetic construct
  misc_feature 1..20: note = Synthetic
  source 1..20: mol_type = other RNA
tgtgagcaaacaacccatga

SEQ ID NO: 1059 - RNA, 20 nt, synthetic construct
  misc_feature 1..20: note = Synthetic
  source 1..20: mol_type = other RNA
atctcagggcttaccgtcat

SEQ ID NO: 1060 - RNA, 20 nt, synthetic construct
  misc_feature 1..20: note = Synthetic
  source 1..20: mol_type = other RNA
cacagctcagtacctaaggt

SEQ ID NO: 1061 - RNA, 20 nt, synthetic construct
  misc_feature 1..20: note = Synthetic
  source 1..20: mol_type = other RNA
cttgtaaacgcaccacagca

SEQ ID NO: 1062 - RNA, 20 nt, synthetic construct
  misc_feature 1..20: note = Synthetic
  source 1..20: mol_type = other RNA
cccagcgtccgtccatggcg

SEQ ID NO: 1063 - RNA, 20 nt, synthetic construct
  misc_feature 1..20: note = Synthetic
  source 1..20: mol_type = other RNA
ttgagaatgaatacgaaact

SEQ ID NO: 1064 - RNA, 20 nt, synthetic construct
  misc_feature 1..20: note = Synthetic
  source 1..20: mol_type = other RNA
gatgacggccaccatccagg

SEQ ID NO: 1065 - RNA, 20 nt, synthetic construct
  misc_feature 1..20: note = Synthetic
  source 1..20: mol_type = other RNA
tcggctgcttcgccttgctg

SEQ ID NO: 1066 - RNA, 20 nt, synthetic construct
  misc_feature 1..20: note = Synthetic
  source 1..20: mol_type = other RNA
aataagttgtccatggctcc

SEQ ID NO: 1067 - RNA, 20 nt, synthetic construct
  misc_feature 1..20: note = Synthetic
  source 1..20: mol_type = other RNA
catctcagggcttaccgtca

SEQ ID NO: 1068 - RNA, 20 nt, synthetic construct
  misc_feature 1..20: note = Synthetic
  source 1..20: mol_type = other RNA
attctcatccgacaatggaa

SEQ ID NO: 1069 - RNA, 20 nt, synthetic construct
  misc_feature 1..20: note = Synthetic
  source 1..20: mol_type = other RNA
ctttcacagctcagtaccta

SEQ ID NO: 1070 - RNA, 20 nt, synthetic construct
  misc_feature 1..20: note = Synthetic
  source 1..20: mol_type = other RNA
caaggtgtggtcaccatact

SEQ ID NO: 1071 - RNA, 20 nt, synthetic construct
  misc_feature 1..20: note = Synthetic
  source 1..20: mol_type = other RNA
ttagccattattggaccccc

SEQ ID NO: 1072 - RNA, 20 nt, synthetic construct
  misc_feature 1..20: note = Synthetic
  source 1..20: mol_type = other RNA
cttattgtgttcaagttcga

SEQ ID NO: 1073 - RNA, 20 nt, synthetic construct
  misc_feature 1..20: note = Synthetic
  source 1..20: mol_type = other RNA
tccccagctttgttccgatc

SEQ ID NO: 1074 - RNA, 20 nt, synthetic construct
  misc_feature 1..20: note = Synthetic
  source 1..20: mol_type = other RNA
ttcctgatcggaacaaagct

SEQ ID NO: 1075 - RNA, 20 nt, synthetic construct
  misc_feature 1..20: note = Synthetic
  source 1..20: mol_type = other RNA
cgtccatggcgtggagcctt

SEQ ID NO: 1076 - RNA, 20 nt, synthetic construct
  misc_feature 1..20: note = Synthetic
  source 1..20: mol_type = other RNA
ggacttataatgtgcaatac

SEQ ID NO: 1077 - RNA, 20 nt, synthetic construct
  misc_feature 1..20: note = Synthetic
  source 1..20: mol_type = other RNA
acttattgtgttcaagttcg

SEQ ID NO: 1078 - RNA, 20 nt, synthetic construct
  misc_feature 1..20: note = Synthetic
  source 1..20: mol_type = other RNA
cattccagggggtccaataa

SEQ ID NO: 1079 - RNA, 20 nt, synthetic construct
  misc_feature 1..20: note = Synthetic
  source 1..20: mol_type = other RNA
gtgaccacaccttgagagtc

SEQ ID NO: 1080 - RNA, 20 nt, synthetic construct
  misc_feature 1..20: note = Synthetic
  source 1..20: mol_type = other RNA
ccgtccatggcgtggagcct

SEQ ID NO: 1081 - RNA, 20 nt, synthetic construct
  misc_feature 1..20: note = Synthetic
  source 1..20: mol_type = other RNA
cttcctgatcggaacaaagc

SEQ ID NO: 1082 - RNA, 20 nt, synthetic construct
  misc_feature 1..20: note = Synthetic
  source 1..20: mol_type = other RNA
agtacttctacttgcattcc

SEQ ID NO: 1083 - RNA, 20 nt, synthetic construct
  misc_feature 1..20: note = Synthetic
  source 1..20: mol_type = other RNA
tgtccgagacaccaaaatcg

SEQ ID NO: 1084 - RNA, 20 nt, synthetic construct
  misc_feature 1..20: note = Synthetic
  source 1..20: mol_type = other RNA
gcagcctgacacgttgatca

SEQ ID NO: 1085 - RNA, 20 nt, synthetic construct
  misc_feature 1..20: note = Synthetic
  source 1..20: mol_type = other RNA
gagcggattctgcccgcaca

SEQ ID NO: 1086 - RNA, 20 nt, synthetic construct
  misc_feature 1..20: note = Synthetic
  source 1..20: mol_type = other RNA
gcaagtgagagcaatgaccg

SEQ ID NO: 1087 - RNA, 20 nt, synthetic construct
  misc_feature 1..20: note = Synthetic
  source 1..20: mol_type = other RNA
gaatccctgatcaacgtgtc

SEQ ID NO: 1088 - RNA, 20 nt, synthetic construct
  misc_feature 1..20: note = Synthetic
  source 1..20: mol_type = other RNA
ggtgtctcggacatgcaagc

SEQ ID NO: 1089 - RNA, 20 nt, synthetic construct
  misc_feature 1..20: note = Synthetic
  source 1..20: mol_type = other RNA
tggtcaacaaaagcgccatg

SEQ ID NO: 1090 - RNA, 20 nt, synthetic construct
  misc_feature 1..20: note = Synthetic
  source 1..20: mol_type = other RNA
catggcgcttttgttgacca

SEQ ID NO: 1091 - RNA, 20 nt, synthetic construct
  misc_feature 1..20: note = Synthetic
  source 1..20: mol_type = other RNA
gcccgcacaaggtctcagct

SEQ ID NO: 1092 - RNA, 20 nt, synthetic construct
  misc_feature 1..20: note = Synthetic
  source 1..20: mol_type = other RNA
ccgagacaccaaaatcgagg

SEQ ID NO: 1093 - RNA, 20 nt, synthetic construct
  misc_feature 1..20: note = Synthetic
  source 1..20: mol_type = other RNA
gagcaggtcctttacaaact

SEQ ID NO: 1094 - RNA, 20 nt, synthetic construct
  misc_feature 1..20: note = Synthetic
  source 1..20: mol_type = other RNA
tggagcatcaacctgacagc

SEQ ID NO: 1095 - RNA, 20 nt, synthetic construct
  misc_feature 1..20: note = Synthetic
  source 1..20: mol_type = other RNA
aaactgggccacctcgattt

SEQ ID NO: 1096 - RNA, 20 nt, synthetic construct
  misc_feature 1..20: note = Synthetic
  source 1..20: mol_type = other RNA
cacgttgatcagggattcca

SEQ ID NO: 1097 - RNA, 20 nt, synthetic construct
  misc_feature 1..20: note = Synthetic
  source 1..20: mol_type = other RNA
tgcccgcacaaggtctcagc

SEQ ID NO: 1098 - RNA, 20 nt, synthetic construct
  misc_feature 1..20: note = Synthetic
  source 1..20: mol_type = other RNA
tgcagcctgacacgttgatc

SEQ ID NO: 1099 - RNA, 20 nt, synthetic construct
  misc_feature 1..20: note = Synthetic
  source 1..20: mol_type = other RNA
ttaaagaaactttttcgcga

SEQ ID NO: 1100 - RNA, 20 nt, synthetic construct
  misc_feature 1..20: note = Synthetic
  source 1..20: mol_type = other RNA
gctagccgacactcaccttc

SEQ ID NO: 1101 - RNA, 20 nt, synthetic construct
  misc_feature 1..20: note = Synthetic
  source 1..20: mol_type = other RNA
cgaggtggcccagtttgtaa

SEQ ID NO: 1102 - RNA, 20 nt, synthetic construct
  misc_feature 1..20: note = Synthetic
  source 1..20: mol_type = other RNA
tttaaagaaactttttcgcg

SEQ ID NO: 1103 - RNA, 20 nt, synthetic construct
  misc_feature 1..20: note = Synthetic
  source 1..20: mol_type = other RNA
gaatccgctcagcatcctct

SEQ ID NO: 1104 - RNA, 20 nt, synthetic construct
  misc_feature 1..20: note = Synthetic
  source 1..20: mol_type = other RNA
ccacctcgattttggtgtct

SEQ ID NO: 1105 - RNA, 20 nt, synthetic construct
  misc_feature 1..20: note = Synthetic
  source 1..20: mol_type = other RNA
tggacatggaatccacccga

SEQ ID NO: 1106 - RNA, 20 nt, synthetic construct
  misc_feature 1..20: note = Synthetic
  source 1..20: mol_type = other RNA
taacatggttatgtagagtg

SEQ ID NO: 1107 - RNA, 20 nt, synthetic construct
  misc_feature 1..20: note = Synthetic
  source 1..20: mol_type = other RNA
atggacatggaatccacccg

SEQ ID NO: 1108 - RNA, 20 nt, synthetic construct
  misc_feature 1..20: note = Synthetic
  source 1..20: mol_type = other RNA
atagtgcctttaacttcccg

SEQ ID NO: 1109 - RNA, 20 nt, synthetic construct
  misc_feature 1..20: note = Synthetic
  source 1..20: mol_type = other RNA
cgagggtcgcactcacccgt

SEQ ID NO: 1110 - RNA, 20 nt, synthetic construct
  misc_feature 1..20: note = Synthetic
  source 1..20: mol_type = other RNA
tagaagtacccctgaatgag

SEQ ID NO: 1111 - RNA, 20 nt, synthetic construct
  misc_feature 1..20: note = Synthetic
  source 1..20: mol_type = other RNA
gtcgcactcacccgtaggcg

SEQ ID NO: 1112 - RNA, 20 nt, synthetic construct
  misc_feature 1..20: note = Synthetic
  source 1..20: mol_type = other RNA
cgggactggtattccttcca

SEQ ID NO: 1113 - RNA, 20 nt, synthetic construct
  misc_feature 1..20: note = Synthetic
  source 1..20: mol_type = other RNA
agtatagttagtgtcgggac

SEQ ID NO: 1114 - RNA, 20 nt, synthetic construct
  misc_feature 1..20: note = Synthetic
  source 1..20: mol_type = other RNA
tttgagctggctccctcggg

SEQ ID NO: 1115 - RNA, 20 nt, synthetic construct
  misc_feature 1..20: note = Synthetic
  source 1..20: mol_type = other RNA
caatttgagctggctccctc

SEQ ID NO: 1116 - RNA, 20 nt, synthetic construct
  misc_feature 1..20: note = Synthetic
  source 1..20: mol_type = other RNA
ccagctcaaattgtagtcta

SEQ ID NO: 1117 - RNA, 20 nt, synthetic construct
  misc_feature 1..20: note = Synthetic
  source 1..20: mol_type = other RNA
tcgggactggtattccttcc

SEQ ID NO: 1118 - RNA, 20 nt, synthetic construct
  misc_feature 1..20: note = Synthetic
  source 1..20: mol_type = other RNA
attgttccagtcatcgtcgc

SEQ ID NO: 1119 - RNA, 20 nt, synthetic construct
  misc_feature 1..20: note = Synthetic
  source 1..20: mol_type = other RNA
ggacttctaaaacttaccac

SEQ ID NO: 1120 - RNA, 20 nt, synthetic construct
  misc_feature 1..20: note = Synthetic
  source 1..20: mol_type = other RNA
gtggaattgcgcttcttacc

SEQ ID NO: 1121 - RNA, 20 nt, synthetic construct
  misc_feature 1..20: note = Synthetic
  source 1..20: mol_type = other RNA
gagacactcaaatttgtcac

SEQ ID NO: 1122 - RNA, 20 nt, synthetic construct
  misc_feature 1..20: note = Synthetic
  source 1..20: mol_type = other RNA
attgcacctgcgacgatgac

SEQ ID NO: 1123 - RNA, 20 nt, synthetic construct
  misc_feature 1..20: note = Synthetic
  source 1..20: mol_type = other RNA
cactctcattggtgctacac

SEQ ID NO: 1124 - RNA, 20 nt, synthetic construct
  misc_feature 1..20: note = Synthetic
  source 1..20: mol_type = other RNA
ccatagactacaatttgagc

SEQ ID NO: 1125 - RNA, 20 nt, synthetic construct
  misc_feature 1..20: note = Synthetic
  source 1..20: mol_type = other RNA
tgatgacctatatgtgcaat

SEQ ID NO: 1126 - RNA, 20 nt, synthetic construct
  misc_feature 1..20: note = Synthetic
  source 1..20: mol_type = other RNA
cacataatgttttctacgta

SEQ ID NO: 1127 - RNA, 20 nt, synthetic construct
  misc_feature 1..20: note = Synthetic
  source 1..20: mol_type = other RNA
ctgactgtgttcaaagtatc

SEQ ID NO: 1128 - RNA, 20 nt, synthetic construct
  misc_feature 1..20: note = Synthetic
  source 1..20: mol_type = other RNA
ggcgggggcgccgcgcctac

SEQ ID NO: 1129 - RNA, 20 nt, synthetic construct
  misc_feature 1..20: note = Synthetic
  source 1..20: mol_type = other RNA
aacttaccacgggaagttaa

SEQ ID NO: 1130 - RNA, 20 nt, synthetic construct
  misc_feature 1..20: note = Synthetic
  source 1..20: mol_type = other RNA
tctattgaacgacgagtttc

SEQ ID NO: 1131 - RNA, 20 nt, synthetic construct
  misc_feature 1..20: note = Synthetic
  source 1..20: mol_type = other RNA
tcttcgataggtcttcacct

SEQ ID NO: 1132 - RNA, 20 nt, synthetic construct
  misc_feature 1..20: note = Synthetic
  source 1..20: mol_type = other RNA
gctgaaatggagcatacctt

SEQ ID NO: 1133 - RNA, 20 nt, synthetic construct
  misc_feature 1..20: note = Synthetic
  source 1..20: mol_type = other RNA
tcaagaagtacacctatgcc

SEQ ID NO: 1134 - RNA, 20 nt, synthetic construct
  misc_feature 1..20: note = Synthetic
  source 1..20: mol_type = other RNA
gaactaaaataccgaaacat

SEQ ID NO: 1135 - RNA, 20 nt, synthetic construct
  misc_feature 1..20: note = Synthetic
  source 1..20: mol_type = other RNA
attgctcagatgacggaatt

SEQ ID NO: 1136 - RNA, 20 nt, synthetic construct
  misc_feature 1..20: note = Synthetic
  source 1..20: mol_type = other RNA
cttgctggaataggtcccaa

SEQ ID NO: 1137 - RNA, 20 nt, synthetic construct
  misc_feature 1..20: note = Synthetic
  source 1..20: mol_type = other RNA
cgagtaaaagtaagatagac

SEQ ID NO: 1138 - RNA, 20 nt, synthetic construct
  misc_feature 1..20: note = Synthetic
  source 1..20: mol_type = other RNA
cctgggcagaaactacttat

SEQ ID NO: 1139 - RNA, 20 nt, synthetic construct
  misc_feature 1..20: note = Synthetic
  source 1..20: mol_type = other RNA
atagtggatcccggatactt

SEQ ID NO: 1140 - RNA, 20 nt, synthetic construct
  misc_feature 1..20: note = Synthetic
  source 1..20: mol_type = other RNA
aggatgcagatttccctatt

SEQ ID NO: 1141 - RNA, 20 nt, synthetic construct
  misc_feature 1..20: note = Synthetic
  source 1..20: mol_type = other RNA
tagagataacctaagtatcc

SEQ ID NO: 1142 - RNA, 20 nt, synthetic construct
  misc_feature 1..20: note = Synthetic
  source 1..20: mol_type = other RNA
tcttcagacaccgagataaa

SEQ ID NO: 1143 - RNA, 20 nt, synthetic construct
  misc_feature 1..20: note = Synthetic
  source 1..20: mol_type = other RNA
ctacgtttctggctaccatt

SEQ ID NO: 1144 - RNA, 20 nt, synthetic construct
  misc_feature 1..20: note = Synthetic
  source 1..20: mol_type = other RNA
gtagcaaagttttcttcgat

SEQ ID NO: 1145 - RNA, 20 nt, synthetic construct
  misc_feature 1..20: note = Synthetic
  source 1..20: mol_type = other RNA
gtaagatagactggcggcaa

SEQ ID NO: 1146 - RNA, 20 nt, synthetic construct
  misc_feature 1..20: note = Synthetic
  source 1..20: mol_type = other RNA
gctttcgtttgcttggctat

SEQ ID NO: 1147 - RNA, 20 nt, synthetic construct
  misc_feature 1..20: note = Synthetic
  source 1..20: mol_type = other RNA
agaaaactttgctacgtttc

SEQ ID NO: 1148 - RNA, 20 nt, synthetic construct
  misc_feature 1..20: note = Synthetic
  source 1..20: mol_type = other RNA
tgcaggactcaccaccaatg

SEQ ID NO: 1149 - RNA, 20 nt, synthetic construct
  misc_feature 1..20: note = Synthetic
  source 1..20: mol_type = other RNA
ggttgaccatcacagtccgg

SEQ ID NO: 1150 - RNA, 20 nt, synthetic construct
  misc_feature 1..20: note = Synthetic
  source 1..20: mol_type = other RNA
aggttgaccatcacagtccg

SEQ ID NO: 1151 - RNA, 20 nt, synthetic construct
  misc_feature 1..20: note = Synthetic
  source 1..20: mol_type = other RNA
ggatcggttgtagtaatctg

SEQ ID NO: 1152 - RNA, 20 nt, synthetic construct
  misc_feature 1..20: note = Synthetic
  source 1..20: mol_type = other RNA
tcccctctgcagccgcaatg

SEQ ID NO: 1153 - RNA, 20 nt, synthetic construct
  misc_feature 1..20: note = Synthetic
  source 1..20: mol_type = other RNA
agagatcctggtcctgcgca

SEQ ID NO: 1154 - RNA, 20 nt, synthetic construct
  misc_feature 1..20: note = Synthetic
  source 1..20: mol_type = other RNA
ggccacatggtggacaatcg

SEQ ID NO: 1155 - RNA, 20 nt, synthetic construct
  misc_feature 1..20: note = Synthetic
  source 1..20: mol_type = other RNA
gaacttcccccggactgtga

SEQ ID NO: 1156 - RNA, 20 nt, synthetic construct
  misc_feature 1..20: note = Synthetic
  source 1..20: mol_type = other RNA
gagaagatactggtgtccgt

SEQ ID NO: 1157 - RNA, 20 nt, synthetic construct
  misc_feature 1..20: note = Synthetic
  source 1..20: mol_type = other RNA
acaaccgatccacctcacct

SEQ ID NO: 1158 - RNA, 20 nt, synthetic construct
  misc_feature 1..20: note = Synthetic
  source 1..20: mol_type = other RNA
tgggctgcatcaacgctgat

SEQ ID NO: 1159 - RNA, 20 nt, synthetic construct
  misc_feature 1..20: note = Synthetic
  source 1..20: mol_type = other RNA
catcaacgctgatgggaacg

SEQ ID NO: 1160 - RNA, 20 nt, synthetic construct
  misc_feature 1..20: note = Synthetic
  source 1..20: mol_type = other RNA
caccccgattgtccaccatg

SEQ ID NO: 1161 - RNA, 20 nt, synthetic construct
  misc_feature 1..20: note = Synthetic
  source 1..20: mol_type = other RNA
ttgggctgcatcaacgctga

SEQ ID NO: 1162 - RNA, 20 nt, synthetic construct
  misc_feature 1..20: note = Synthetic
  source 1..20: mol_type = other RNA
aagagatcctggtcctgcgc

SEQ ID NO: 1163 - RNA, 20 nt, synthetic construct
  misc_feature 1..20: note = Synthetic
  source 1..20: mol_type = other RNA
cagtatcttctccagccgga

SEQ ID NO: 1164 - RNA, 20 nt, synthetic construct
  misc_feature 1..20: note = Synthetic
  source 1..20: mol_type = other RNA
gtggacaatcggggtgacac

SEQ ID NO: 1165 - RNA, 20 nt, synthetic construct
  misc_feature 1..20: note = Synthetic
  source 1..20: mol_type = other RNA
gaggcaaagtgccgccactt

SEQ ID NO: 1166 - RNA, 20 nt, synthetic construct
  misc_feature 1..20: note = Synthetic
  source 1..20: mol_type = other RNA
taggccacatggtggacaat

SEQ ID NO: 1167 - RNA, 20 nt, synthetic construct
  misc_feature 1..20: note = Synthetic
  source 1..20: mol_type = other RNA
cagcgttgatgcagcccaag

SEQ ID NO: 1168 - RNA, 20 nt, synthetic construct
  misc_feature 1..20: note = Synthetic
  source 1..20: mol_type = other RNA
atcacaatcccacgaaatcc

SEQ ID NO: 1169 - RNA, 20 nt, synthetic construct
  misc_feature 1..20: note = Synthetic
  source 1..20: mol_type = other RNA
cttccggctggagaagatac

SEQ ID NO: 1170 - RNA, 20 nt, synthetic construct
  misc_feature 1..20: note = Synthetic
  source 1..20: mol_type = other RNA
ttgggcatcctggatttcgt

SEQ ID NO: 1171 - RNA, 20 nt, synthetic construct
  misc_feature 1..20: note = Synthetic
  source 1..20: mol_type = other RNA
gtagtaatctgaggaccttt

SEQ ID NO: 1172 - RNA, 20 nt, synthetic construct
  misc_feature 1..20: note = Synthetic
  source 1..20: mol_type = other RNA
ggaggcaaagtgccgccact

SEQ ID NO: 1173 - RNA, 20 nt, synthetic construct
  misc_feature 1..20: note = Synthetic
  source 1..20: mol_type = other RNA
tggtattggtattccggtta

SEQ ID NO: 1174 - RNA, 20 nt, synthetic construct
  misc_feature 1..20: note = Synthetic
  source 1..20: mol_type = other RNA
gtgtgacgttggatcgctgg

SEQ ID NO: 1175 - RNA, 20 nt, synthetic construct
  misc_feature 1..20: note = Synthetic
  source 1..20: mol_type = other RNA
ttcacgatgccggttcccgg

SEQ ID NO: 1176 - RNA, 20 nt, synthetic construct
  misc_feature 1..20: note = Synthetic
  source 1..20: mol_type = other RNA
catttccgtgagtccctcgg

SEQ ID NO: 1177 - RNA, 20 nt, synthetic construct
  misc_feature 1..20: note = Synthetic
  source 1..20: mol_type = other RNA
tccattcgatgtgagccacg

SEQ ID NO: 1178 - RNA, 20 nt, synthetic construct
  misc_feature 1..20: note = Synthetic
  source 1..20: mol_type = other RNA
acaaggagacctgttccccg

SEQ ID NO: 1179 - RNA, 20 nt, synthetic construct
  misc_feature 1..20: note = Synthetic
  source 1..20: mol_type = other RNA
cgtccccgacctgttcggcg

SEQ ID NO: 1180 - RNA, 20 nt, synthetic construct
  misc_feature 1..20: note = Synthetic
  source 1..20: mol_type = other RNA
agacccacacacgccctacg

SEQ ID NO: 1181 - RNA, 20 nt, synthetic construct
  misc_feature 1..20: note = Synthetic
  source 1..20: mol_type = other RNA
actcgggctgggacacgatg

SEQ ID NO: 1182 - RNA, 20 nt, synthetic construct
  misc_feature 1..20: note = Synthetic
  source 1..20: mol_type = other RNA
tcgcagggaggcgccacccg

SEQ ID NO: 1183 - RNA, 20 nt, synthetic construct
  misc_feature 1..20: note = Synthetic
  source 1..20: mol_type = other RNA
gccagcatcctgtacctcga

SEQ ID NO: 1184 - RNA, 20 nt, synthetic construct
  misc_feature 1..20: note = Synthetic
  source 1..20: mol_type = other RNA
gtgggaccccaacatcaccg

SEQ ID NO: 1185 - RNA, 20 nt, synthetic construct
  misc_feature 1..20: note = Synthetic
  source 1..20: mol_type = other RNA
gcagagttaccgcaggtatg

SEQ ID NO: 1186 - RNA, 20 nt, synthetic construct
  misc_feature 1..20: note = Synthetic
  source 1..20: mol_type = other RNA
cagttcctgctcaccgcctg

SEQ ID NO: 1187 - RNA, 20 nt, synthetic construct
  misc_feature 1..20: note = Synthetic
  source 1..20: mol_type = other RNA
cgtagtctgctacttcagcg

SEQ ID NO: 1188 - RNA, 20 nt, synthetic construct
  misc_feature 1..20: note = Synthetic
  source 1..20: mol_type = other RNA
gggccgcatgcaccgcgtag

SEQ ID NO: 1189 - RNA, 20 nt, synthetic construct
  misc_feature 1..20: note = Synthetic
  source 1..20: mol_type = other RNA
tgtcgggggacaactacctg

SEQ ID NO: 1190 - RNA, 20 nt, synthetic construct
  misc_feature 1..20: note = Synthetic
  source 1..20: mol_type = other RNA
actgcggcaccgtcagccag

SEQ ID NO: 1191 - RNA, 20 nt, synthetic construct
  misc_feature 1..20: note = Synthetic
  source 1..20: mol_type = other RNA
ggtcagggtcaaccacaaag

SEQ ID NO: 1192 - RNA, 20 nt, synthetic construct
  misc_feature 1..20: note = Synthetic
  source 1..20: mol_type = other RNA
atgggtagattcgttccaca

SEQ ID NO: 1193 - RNA, 20 nt, synthetic construct
  misc_feature 1..20: note = Synthetic
  source 1..20: mol_type = other RNA
aaacagtcgcggagtgtctg

SEQ ID NO: 1194 - RNA, 20 nt, synthetic construct
  misc_feature 1..20: note = Synthetic
  source 1..20: mol_type = other RNA
cccgcggcacgcgcgccaag

SEQ ID NO: 1195 - RNA, 20 nt, synthetic construct
  misc_feature 1..20: note = Synthetic
  source 1..20: mol_type = other RNA
gcgaccacggaaagcccgtg

SEQ ID NO: 1196 - RNA, 20 nt, synthetic construct
  misc_feature 1..20: note = Synthetic
  source 1..20: mol_type = other RNA
cccccgacagctcccctacg

SEQ ID NO: 1197 - RNA, 20 nt, synthetic construct
  misc_feature 1..20: note = Synthetic
  source 1..20: mol_type = other RNA
cgggccgcatgcaccgcgta

SEQ ID NO: 1198 - RNA, 20 nt, synthetic construct
  misc_feature 1..20: note = Synthetic
  source 1..20: mol_type = other RNA
tggctgacggtgccgcagtc

SEQ ID NO: 1199 - RNA, 20 nt, synthetic construct
  misc_feature 1..20: note = Synthetic
  source 1..20: mol_type = other RNA
aggaggtcaggagacgccat

SEQ ID NO: 1200 - RNA, 20 nt, synthetic construct
  misc_feature 1..20: note = Synthetic
  source 1..20: mol_type = other RNA
gcgagagcatcaagccttcg

SEQ ID NO: 1201 - RNA, 20 nt, synthetic construct
  misc_feature 1..20: note = Synthetic
  source 1..20: mol_type = other RNA
ccatttccgtgagtccctcg

SEQ ID NO: 1202 - RNA, 20 nt, synthetic construct
  misc_feature 1..20: note = Synthetic
  source 1..20: mol_type = other RNA
gggagcagaccagcgcccgg

SEQ ID NO: 1203 - RNA, 20 nt, synthetic construct
  misc_feature 1..20: note = Synthetic
  source 1..20: mol_type = other RNA
cacgtcgagtctcaccggct

SEQ ID NO: 1204 - RNA, 20 nt, synthetic construct
  misc_feature 1..20: note = Synthetic
  source 1..20: mol_type = other RNA
acctgagctcatgcatggcg

SEQ ID NO: 1205 - RNA, 20 nt, synthetic construct
  misc_feature 1..20: note = Synthetic
  source 1..20: mol_type = other RNA
gcacatgcaccacatacctg

SEQ ID NO: 1206 - RNA, 20 nt, synthetic construct
  misc_feature 1..20: note = Synthetic
  source 1..20: mol_type = other RNA
gcgtagagtgagtgtgacgt

SEQ ID NO: 1207 - RNA, 20 nt, synthetic construct
  misc_feature 1..20: note = Synthetic
  source 1..20: mol_type = other RNA
cccgctcatggacaggttcg

SEQ ID NO: 1208 - RNA, 20 nt, synthetic construct
  misc_feature 1..20: note = Synthetic
  source 1..20: mol_type = other RNA
gctcatggacaggttcgagg

SEQ ID NO: 1209 - RNA, 20 nt, synthetic construct
  misc_feature 1..20: note = Synthetic
  source 1..20: mol_type = other RNA
ccgggccgcatgcaccgcgt

SEQ ID NO: 1210 - RNA, 20 nt, synthetic construct
  misc_feature 1..20: note = Synthetic
  source 1..20: mol_type = other RNA
attcgaaccagtcgggacag

SEQ ID NO: 1211 - RNA, 20 nt, synthetic construct
  misc_feature 1..20: note = Synthetic
  source 1..20: mol_type = other RNA
gggcgcccgcttcacgatgc

SEQ ID NO: 1212 - RNA, 20 nt, synthetic construct
  misc_feature 1..20: note = Synthetic
  source 1..20: mol_type = other RNA
cgccagtgccagccggactg

SEQ ID NO: 1213 - RNA, 20 nt, synthetic construct
  misc_feature 1..20: note = Synthetic
  source 1..20: mol_type = other RNA
gacgtgagggagcacctcga

SEQ ID NO: 1214 - RNA, 20 nt, synthetic construct
  misc_feature 1..20: note = Synthetic
  source 1..20: mol_type = other RNA
gggctgcagtagacccgcca

SEQ ID NO: 1215 - RNA, 20 nt, synthetic construct
  misc_feature 1..20: note = Synthetic
  source 1..20: mol_type = other RNA
tcctcctcgtagggcgtgtg

SEQ ID NO: 1216 - RNA, 20 nt, synthetic construct
  misc_feature 1..20: note = Synthetic
  source 1..20: mol_type = other RNA
ccggtggtccaggagtcgca

SEQ ID NO: 1217 - RNA, 20 nt, synthetic construct
  misc_feature 1..20: note = Synthetic
  source 1..20: mol_type = other RNA
tccccgtggctcacatcgaa

SEQ ID NO: 1218 - RNA, 20 nt, synthetic construct
  misc_feature 1..20: note = Synthetic
  source 1..20: mol_type = other RNA
cagataactctgcaccctcg

SEQ ID NO: 1219 - RNA, 20 nt, synthetic construct
  misc_feature 1..20: note = Synthetic
  source 1..20: mol_type = other RNA
agccagcatcctgtacctcg

SEQ ID NO: 1220 - RNA, 20 nt, synthetic construct
  misc_feature 1..20: note = Synthetic
  source 1..20: mol_type = other RNA
gctgtgttcttacccgcctg

SEQ ID NO: 1221 - RNA, 20 nt, synthetic construct
  misc_feature 1..20: note = Synthetic
  source 1..20: mol_type = other RNA
tgatgaaccagtacacccac

SEQ ID NO: 1222 - RNA, 20 nt, synthetic construct
  misc_feature 1..20: note = Synthetic
  source 1..20: mol_type = other RNA
cttataataaatatggtccg

SEQ ID NO: 1223 - RNA, 20 nt, synthetic construct
  misc_feature 1..20: note = Synthetic
  source 1..20: mol_type = other RNA
ttatttcagataatgcaccc

SEQ ID NO: 1224 - RNA, 20 nt, synthetic construct
  misc_feature 1..20: note = Synthetic
  source 1..20: mol_type = other RNA
tttgaatcttcatcatacga

SEQ ID NO: 1225 - RNA, 20 nt, synthetic construct
  misc_feature 1..20: note = Synthetic
  source 1..20: mol_type = other RNA
atagttacagccatacctct

SEQ ID NO: 1226 - RNA, 20 nt, synthetic construct
  misc_feature 1..20: note = Synthetic
  source 1..20: mol_type = other RNA
atgactgattctgactgtag

SEQ ID NO: 1227 - RNA, 20 nt, synthetic construct
  misc_feature 1..20: note = Synthetic
  source 1..20: mol_type = other RNA
gaatcctcctgataacatca

SEQ ID NO: 1228 - RNA, 20 nt, synthetic construct
  misc_feature 1..20: note = Synthetic
  source 1..20: mol_type = other RNA
gtatccttgatgttatcagg

SEQ ID NO: 1229 - RNA, 20 nt, synthetic construct
  misc_feature 1..20: note = Synthetic
  source 1..20: mol_type = other RNA
agatagccagcctagaggta

SEQ ID NO: 1230 - RNA, 20 nt, synthetic construct
  misc_feature 1..20: note = Synthetic
  source 1..20: mol_type = other RNA
caagttctcttcattgacca

SEQ ID NO: 1231 - RNA, 20 nt, synthetic construct
  misc_feature 1..20: note = Synthetic
  source 1..20: mol_type = other RNA
gcatcttattatcatgtcct

SEQ ID NO: 1232 - RNA, 20 nt, synthetic construct
  misc_feature 1..20: note = Synthetic
  source 1..20: mol_type = other RNA
aaggctcagtcttaccttaa

SEQ ID NO: 1233 - RNA, 20 nt, synthetic construct
  misc_feature 1..20: note = Synthetic
  source 1..20: mol_type = other RNA
ttacagccatacctctaggc

SEQ ID NO: 1234 - RNA, 20 nt, synthetic construct
  misc_feature 1..20: note = Synthetic
  source 1..20: mol_type = other RNA
tcagtcatatcttcaaatag

SEQ ID NO: 1235 - RNA, 20 nt, synthetic construct
  misc_feature 1..20: note = Synthetic
  source 1..20: mol_type = other RNA
ttctttcagagaagtgtccc

SEQ ID NO: 1236 - RNA, 20 nt, synthetic construct
  misc_feature 1..20: note = Synthetic
  source 1..20: mol_type = other RNA
tataaagatagccagcctag

SEQ ID NO: 1237 - RNA, 20 nt, synthetic construct
  misc_feature 1..20: note = Synthetic
  source 1..20: mol_type = other RNA
caaatagaggccgatttcct

SEQ ID NO: 1238 - RNA, 20 nt, synthetic construct
  misc_feature 1..20: note = Synthetic
  source 1..20: mol_type = other RNA
tgcatcttattatcatgtcc

SEQ ID NO: 1239 - RNA, 20 nt, synthetic construct
  misc_feature 1..20: note = Synthetic
  source 1..20: mol_type = other RNA
acgccgagtttgaagatcag

SEQ ID NO: 1240 - RNA, 20 nt, synthetic construct
  misc_feature 1..20: note = Synthetic
  source 1..20: mol_type = other RNA
ttcacgtccccacattactg

SEQ ID NO: 1241 - RNA, 20 nt, synthetic construct
  misc_feature 1..20: note = Synthetic
  source 1..20: mol_type = other RNA
atcatgcaaagcaattctcg

SEQ ID NO: 1242 - RNA, 20 nt, synthetic construct
  misc_feature 1..20: note = Synthetic
  source 1..20: mol_type = other RNA
aacgccgagtttgaagatca

SEQ ID NO: 1243 - RNA, 20 nt, synthetic construct
  misc_feature 1..20: note = Synthetic
  source 1..20: mol_type = other RNA
tgtaatttattggatgttcg

SEQ ID NO: 1244 - RNA, 20 nt, synthetic construct
  misc_feature 1..20: note = Synthetic
  source 1..20: mol_type = other RNA
gcagacatggctgatatccc

SEQ ID NO: 1245 - RNA, 20 nt, synthetic construct
  misc_feature 1..20: note = Synthetic
  source 1..20: mol_type = other RNA
acttccggttcgtctctacc

SEQ ID NO: 1246 - RNA, 20 nt, synthetic construct
  misc_feature 1..20: note = Synthetic
  source 1..20: mol_type = other RNA
caagccaggtagagacgaac

SEQ ID NO: 1247 - RNA, 20 nt, synthetic construct
  misc_feature 1..20: note = Synthetic
  source 1..20: mol_type = other RNA
tataagcacccaaagggtca

SEQ ID NO: 1248 - RNA, 20 nt, synthetic construct
  misc_feature 1..20: note = Synthetic
  source 1..20: mol_type = other RNA
ccccttcaaccacagtaatg

SEQ ID NO: 1249 - RNA, 20 nt, synthetic construct
  misc_feature 1..20: note = Synthetic
  source 1..20: mol_type = other RNA
cccttcaaccacagtaatgt

SEQ ID NO: 1250 - RNA, 20 nt, synthetic construct
  misc_feature 1..20: note = Synthetic
  source 1..20: mol_type = other RNA
ccccacattactgtggttga

SEQ ID NO: 1251 - RNA, 20 nt, synthetic construct
  misc_feature 1..20: note = Synthetic
  source 1..20: mol_type = other RNA
gagaattacccttgaccctt

SEQ ID NO: 1252 - RNA, 20 nt, synthetic construct
  misc_feature 1..20: note = Synthetic
  source 1..20: mol_type = other RNA
tcggcgttcttctttatcgt

SEQ ID NO: 1253 - RNA, 20 nt, synthetic construct
  misc_feature 1..20: note = Synthetic
  source 1..20: mol_type = other RNA
agatcgcagtaatatagttc

SEQ ID NO: 1254 - RNA, 20 nt, synthetic construct
  misc_feature 1..20: note = Synthetic
  source 1..20: mol_type = other RNA
gggtaattctctacaattca

SEQ ID NO: 1255 - RNA, 20 nt, synthetic construct
  misc_feature 1..20: note = Synthetic
  source 1..20: mol_type = other RNA
gcaattctcgaggaactcct

SEQ ID NO: 1256 - RNA, 20 nt, synthetic construct
  misc_feature 1..20: note = Synthetic
  source 1..20: mol_type = other RNA
cggcgttcttctttatcgtt

SEQ ID NO: 1257 - RNA, 20 nt, synthetic construct
  misc_feature 1..20: note = Synthetic
  source 1..20: mol_type = other RNA
actgcaacatggttaagctt

SEQ ID NO: 1258 - RNA, 20 nt, synthetic construct
  misc_feature 1..20: note = Synthetic
  source 1..20: mol_type = other RNA
ctcttgtgaagacgtggcct

SEQ ID NO: 1259 - RNA, 20 nt, synthetic construct
  misc_feature 1..20: note = Synthetic
  source 1..20: mol_type = other RNA
cctgtgtcattcaactcaac

SEQ ID NO: 1260 - RNA, 20 nt, synthetic construct
  misc_feature 1..20: note = Synthetic
  source 1..20: mol_type = other RNA
gaacgccgagtttgaagatc

SEQ ID NO: 1261 - RNA, 20 nt, synthetic construct
  misc_feature 1..20: note = Synthetic
  source 1..20: mol_type = other RNA
cctcttgtgaagacgtggcc

SEQ ID NO: 1262 - RNA, 20 nt, synthetic construct
  misc_feature 1..20: note = Synthetic
  source 1..20: mol_type = other RNA
caattctcgaggaactcctt

SEQ ID NO: 1263 - RNA, 20 nt, synthetic construct
  misc_feature 1..20: note = Synthetic
  source 1..20: mol_type = other RNA
aggtcgttactacccatgaa

SEQ ID NO: 1264 - RNA, 20 nt, synthetic construct
  misc_feature 1..20: note = Synthetic
  source 1..20: mol_type = other RNA
aaggagcaaccgaatcgtag

SEQ ID NO: 1265 - RNA, 20 nt, synthetic construct
  misc_feature 1..20: note = Synthetic
  source 1..20: mol_type = other RNA
agcaaggatcagacgcttgg

SEQ ID NO: 1266 - RNA, 20 nt, synthetic construct
  misc_feature 1..20: note = Synthetic
  source 1..20: mol_type = other RNA
tctaatggatctccattcga

SEQ ID NO: 1267 - RNA, 20 nt, synthetic construct
  misc_feature 1..20: note = Synthetic
  source 1..20: mol_type = other RNA
tccagcggtaacctggtaca

SEQ ID NO: 1268 - RNA, 20 nt, synthetic construct
  misc_feature 1..20: note = Synthetic
  source 1..20: mol_type = other RNA
gagcaaggatcagacgcttg

SEQ ID NO: 1269 - RNA, 20 nt, synthetic construct
  misc_feature 1..20: note = Synthetic
  source 1..20: mol_type = other RNA
taggtcgttactacccatga

SEQ ID NO: 1270 - RNA, 20 nt, synthetic construct
  misc_feature 1..20: note = Synthetic
  source 1..20: mol_type = other RNA
atgtgatgcggaatactcac

SEQ ID NO: 1271 - RNA, 20 nt, synthetic construct
  misc_feature 1..20: note = Synthetic
  source 1..20: mol_type = other RNA
gtaccggacctaccagagca

SEQ ID NO: 1272 - RNA, 20 nt, synthetic construct
  misc_feature 1..20: note = Synthetic
  source 1..20: mol_type = other RNA
acgacctatctgatgtccaa

SEQ ID NO: 1273 - RNA, 20 nt, synthetic construct
  misc_feature 1..20: note = Synthetic
  source 1..20: mol_type = other RNA
cccagaattattcacccctg

SEQ ID NO: 1274 - RNA, 20 nt, synthetic construct
  misc_feature 1..20: note = Synthetic
  source 1..20: mol_type = other RNA
accttgtaccaggttaccgc

SEQ ID NO: 1275 - RNA, 20 nt, synthetic construct
  misc_feature 1..20: note = Synthetic
  source 1..20: mol_type = other RNA
agtcggatactgtgagttcg

SEQ ID NO: 1276 - RNA, 20 nt, synthetic construct
  misc_feature 1..20: note = Synthetic
  source 1..20: mol_type = other RNA
tggtaccaacaaccttcgaa

SEQ ID NO: 1277 - RNA, 20 nt, synthetic construct
  misc_feature 1..20: note = Synthetic
  source 1..20: mol_type = other RNA
acccagaattattcacccct

SEQ ID NO: 1278 - RNA, 20 nt, synthetic construct
  misc_feature 1..20: note = Synthetic
  source 1..20: mol_type = other RNA
gttgttcaagtgagaaccat

SEQ ID NO: 1279 - RNA, 20 nt, synthetic construct
  misc_feature 1..20: note = Synthetic
  source 1..20: mol_type = other RNA
aaaactctcagggattcacg

SEQ ID NO: 1280 - RNA, 20 nt, synthetic construct
  misc_feature 1..20: note = Synthetic
  source 1..20: mol_type = other RNA
gatctccattcgaaggttgt

SEQ ID NO: 1281 - RNA, 20 nt, synthetic construct
  misc_feature 1..20: note = Synthetic
  source 1..20: mol_type = other RNA
ttcgaatggagatccattag

SEQ ID NO: 1282 - RNA, 20 nt, synthetic construct
  misc_feature 1..20: note = Synthetic
  source 1..20: mol_type = other RNA
agatattctggatcctgtcg

SEQ ID NO: 1283 - RNA, 20 nt, synthetic construct
  misc_feature 1..20: note = Synthetic
  source 1..20: mol_type = other RNA
aagcacgatttggctttgaa

SEQ ID NO: 1284 - RNA, 20 nt, synthetic construct
  misc_feature 1..20: note = Synthetic
  source 1..20: mol_type = other RNA
gcttggcaccatcgggaccc

SEQ ID NO: 1285 - RNA, 20 nt, synthetic construct
  misc_feature 1..20: note = Synthetic
  source 1..20: mol_type = other RNA
gagggcactcgccgccagca

SEQ ID NO: 1286 - RNA, 20 nt, synthetic construct
  misc_feature 1..20: note = Synthetic
  source 1..20: mol_type = other RNA
tttcaatccagtgcctgtag

SEQ ID NO: 1287 - RNA, 20 nt, synthetic construct
  misc_feature 1..20: note = Synthetic
  source 1..20: mol_type = other RNA
cgggagaacaatgctctgtt

SEQ ID NO: 1288 - RNA, 20 nt, synthetic construct
  misc_feature 1..20: note = Synthetic
  source 1..20: mol_type = other RNA
cgttactacccatgaagggc

SEQ ID NO: 1289 - RNA, 20 nt, synthetic construct
  misc_feature 1..20: note = Synthetic
  source 1..20: mol_type = other RNA
gacccagaattattcacccc

SEQ ID NO: 1290 - RNA, 20 nt, synthetic construct
  misc_feature 1..20: note = Synthetic
  source 1..20: mol_type = other RNA
gctacatcataggggctcct

SEQ ID NO: 1291 - RNA, 20 nt, synthetic construct
  misc_feature 1..20: note = Synthetic
  source 1..20: mol_type = other RNA
aaacttcatccactacgatt

SEQ ID NO: 1292 - RNA, 20 nt, synthetic construct
  misc_feature 1..20: note = Synthetic
  source 1..20: mol_type = other RNA
tcactcagcgtgatcttcgc

SEQ ID NO: 1293 - RNA, 20 nt, synthetic construct
  misc_feature 1..20: note = Synthetic
  source 1..20: mol_type = other RNA
agagcttttttcacgagatg

SEQ ID NO: 1294 - RNA, 20 nt, synthetic construct
  misc_feature 1..20: note = Synthetic
  source 1..20: mol_type = other RNA
accagctcagaattacctct

SEQ ID NO: 1295 - RNA, 20 nt, synthetic construct
  misc_feature 1..20: note = Synthetic
  source 1..20: mol_type = other RNA
ccccaggggtgaataattct

SEQ ID NO: 1296 - RNA, 20 nt, synthetic construct
  misc_feature 1..20: note = Synthetic
  source 1..20: mol_type = other RNA
ggatcctgtcgaggacacac

SEQ ID NO: 1297 - RNA, 20 nt, synthetic construct
  misc_feature 1..20: note = Synthetic
  source 1..20: mol_type = other RNA
tctcagtacctgaggcgaaa

SEQ ID NO: 1298 - RNA, 20 nt, synthetic construct
  misc_feature 1..20: note = Synthetic
  source 1..20: mol_type = other RNA
cggcgagtgccctcctctac

SEQ ID NO: 1299 - RNA, 20 nt, synthetic construct
  misc_feature 1..20: note = Synthetic
  source 1..20: mol_type = other RNA
ttgaaatagtgctgctgtac

SEQ ID NO: 1300 - RNA, 20 nt, synthetic construct
  misc_feature 1..20: note = Synthetic
  source 1..20: mol_type = other RNA
caagcgtctgatccttgctc

SEQ ID NO: 1301 - RNA, 20 nt, synthetic construct
  misc_feature 1..20: note = Synthetic
  source 1..20: mol_type = other RNA
agagcaaggatcagacgctt

SEQ ID NO: 1302 - RNA, 20 nt, synthetic construct
  misc_feature 1..20: note = Synthetic
  source 1..20: mol_type = other RNA
aagcctctccaagtaactgt

SEQ ID NO: 1303 - RNA, 20 nt, synthetic construct
  misc_feature 1..20: note = Synthetic
  source 1..20: mol_type = other RNA
ttctttcagttggacggact

SEQ ID NO: 1304 - RNA, 20 nt, synthetic construct
  misc_feature 1..20: note = Synthetic
  source 1..20: mol_type = other RNA
ctgggtccattgacatagtt

SEQ ID NO: 1305 - RNA, 20 nt, synthetic construct
  misc_feature 1..20: note = Synthetic
  source 1..20: mol_type = other RNA
aggcatgtggtagcgcattt

SEQ ID NO: 1306 - RNA, 20 nt, synthetic construct
  misc_feature 1..20: note = Synthetic
  source 1..20: mol_type = other RNA
gttgcaggagagcgaattaa

SEQ ID NO: 1307 - RNA, 20 nt, synthetic construct
  misc_feature 1..20: note = Synthetic
  source 1..20: mol_type = other RNA
cacaaagtccagcggtaacc

SEQ ID NO: 1308 - RNA, 20 nt, synthetic construct
  misc_feature 1..20: note = Synthetic
  source 1..20: mol_type = other RNA
gctttgcagctaatagttaa

SEQ ID NO: 1309 - RNA, 20 nt, synthetic construct
  misc_feature 1..20: note = Synthetic
  source 1..20: mol_type = other RNA
attagctgcaaagcacgatt

SEQ ID NO: 1310 - RNA, 20 nt, synthetic construct
  misc_feature 1..20: note = Synthetic
  source 1..20: mol_type = other RNA
actgggtccattgacatagt

SEQ ID NO: 1311 - RNA, 20 nt, synthetic construct
  misc_feature 1..20: note = Synthetic
  source 1..20: mol_type = other RNA
tgtgctacacggatacccca

SEQ ID NO: 1312 - RNA, 20 nt, synthetic construct
  misc_feature 1..20: note = Synthetic
  source 1..20: mol_type = other RNA
gatgctataactacgattcg

SEQ ID NO: 1313 - RNA, 20 nt, synthetic construct
  misc_feature 1..20: note = Synthetic
  source 1..20: mol_type = other RNA
gcgcacaaatcccttctacc

SEQ ID NO: 1314 - RNA, 20 nt, synthetic construct
  misc_feature 1..20: note = Synthetic
  source 1..20: mol_type = other RNA
agatgtgtttgctcccagcg

SEQ ID NO: 1315 - RNA, 20 nt, synthetic construct
  misc_feature 1..20: note = Synthetic
  source 1..20: mol_type = other RNA
ctcccattctactgatatcg

SEQ ID NO: 1316 - RNA, 20 nt, synthetic construct
  misc_feature 1..20: note = Synthetic
  source 1..20: mol_type = other RNA
aacacatctgacctacaggt

SEQ ID NO: 1317 - RNA, 20 nt, synthetic construct
  misc_feature 1..20: note = Synthetic
  source 1..20: mol_type = other RNA
gagctcaacttccgggtaga

SEQ ID NO: 1318 - RNA, 20 nt, synthetic construct
  misc_feature 1..20: note = Synthetic
  source 1..20: mol_type = other RNA
tgatgctataactacgattc

SEQ ID NO: 1319 - RNA, 20 nt, synthetic construct
  misc_feature 1..20: note = Synthetic
  source 1..20: mol_type = other RNA
tcactgaggggaaccctcgc

SEQ ID NO: 1320 - RNA, 20 nt, synthetic construct
  misc_feature 1..20: note = Synthetic
  source 1..20: mol_type = other RNA
gatggcatccaagccatata

SEQ ID NO: 1321 - RNA, 20 nt, synthetic construct
  misc_feature 1..20: note = Synthetic
  source 1..20: mol_type = other RNA
tcgtttatattcatcatacc

SEQ ID NO: 1322 - RNA, 20 nt, synthetic construct
  misc_feature 1..20: note = Synthetic
  source 1..20: mol_type = other RNA
gattggcagggaataagtac

SEQ ID NO: 1323 - RNA, 20 nt, synthetic construct
  misc_feature 1..20: note = Synthetic
  source 1..20: mol_type = other RNA
agctcaacttccgggtagaa

SEQ ID NO: 1324 - RNA, 20 nt, synthetic construct
  misc_feature 1..20: note = Synthetic
  source 1..20: mol_type = other RNA
ttgatgctataactacgatt

SEQ ID NO: 1325 - RNA, 20 nt, synthetic construct
  misc_feature 1..20: note = Synthetic
  source 1..20: mol_type = other RNA
cttactgtcacacgcttttg

SEQ ID NO: 1326 - RNA, 20 nt, synthetic construct
  misc_feature 1..20: note = Synthetic
  source 1..20: mol_type = other RNA
taccctagctacaccttcag

SEQ ID NO: 1327 - RNA, 20 nt, synthetic construct
  misc_feature 1..20: note = Synthetic
  source 1..20: mol_type = other RNA
caccactgaaggtgtagcta

SEQ ID NO: 1328 - RNA, 20 nt, synthetic construct
  misc_feature 1..20: note = Synthetic
  source 1..20: mol_type = other RNA
tataaacgatctatggatcc

SEQ ID NO: 1329 - RNA, 20 nt, synthetic construct
  misc_feature 1..20: note = Synthetic
  source 1..20: mol_type = other RNA
tgatgaatataaacgatcta

SEQ ID NO: 1330 - RNA, 20 nt, synthetic construct
  misc_feature 1..20: note = Synthetic
  source 1..20: mol_type = other RNA
gcaagatgtggacttagtcc

SEQ ID NO: 1331 - RNA, 20 nt, synthetic construct
  misc_feature 1..20: note = Synthetic
  source 1..20: mol_type = other RNA
aatcgtagttatagcatcaa

SEQ ID NO: 1332 - RNA, 20 nt, synthetic construct
  misc_feature 1..20: note = Synthetic
  source 1..20: mol_type = other RNA
catactcaccatatatggct

SEQ ID NO: 1333 - RNA, 20 nt, synthetic construct
  misc_feature 1..20: note = Synthetic
  source 1..20: mol_type = other RNA
tcaccactgaaggtgtagct

SEQ ID NO: 1334 - RNA, 20 nt, synthetic construct
  misc_feature 1..20: note = Synthetic
  source 1..20: mol_type = other RNA
aaaccggacttcatctctgt

SEQ ID NO: 1335 - RNA, 20 nt, synthetic construct
  misc_feature 1..20: note = Synthetic
  source 1..20: mol_type = other RNA
tggtgatgttcagctagctc

SEQ ID NO: 1336 - RNA, 20 nt, synthetic construct
  misc_feature 1..20: note = Synthetic
  source 1..20: mol_type = other RNA
agccccgatatcagtagaat

SEQ ID NO: 1337 - RNA, 20 nt, synthetic construct
  misc_feature 1..20: note = Synthetic
  source 1..20: mol_type = other RNA
ctaatagctggttcaactgc

SEQ ID NO: 1338 - RNA, 20 nt, synthetic construct
  misc_feature 1..20: note = Synthetic
  source 1..20: mol_type = other RNA
agcttactgtcacacgcttt

SEQ ID NO: 1339 - RNA, 20 nt, synthetic construct
  misc_feature 1..20: note = Synthetic
  source 1..20: mol_type = other RNA
gcttactgtcacacgctttt

SEQ ID NO: 1340 - RNA, 20 nt, synthetic construct
  misc_feature 1..20: note = Synthetic
  source 1..20: mol_type = other RNA
tgagcatcccctccaatacc

SEQ ID NO: 1341 - RNA, 20 nt, synthetic construct
  misc_feature 1..20: note = Synthetic
  source 1..20: mol_type = other RNA
gctatcattttgggataacc

SEQ ID NO: 1342 - RNA, 20 nt, synthetic construct
  misc_feature 1..20: note = Synthetic
  source 1..20: mol_type = other RNA
cacacgcttttggggtttgt

SEQ ID NO: 1343 - RNA, 20 nt, synthetic construct
  misc_feature 1..20: note = Synthetic
  source 1..20: mol_type = other RNA
tggcttacctctgaaattgt

SEQ ID NO: 1344 - RNA, 20 nt, synthetic construct
  misc_feature 1..20: note = Synthetic
  source 1..20: mol_type = other RNA
gtcgcggtcgtagtcctcag

SEQ ID NO: 1345 - RNA, 20 nt, synthetic construct
  misc_feature 1..20: note = Synthetic
  source 1..20: mol_type = other RNA
ccgctggtgcggcaccactg

SEQ ID NO: 1346 - RNA, 20 nt, synthetic construct
  misc_feature 1..20: note = Synthetic
  source 1..20: mol_type = other RNA
acatctgggttgccgcagcg

SEQ ID NO: 1347 - RNA, 20 nt, synthetic construct
  misc_feature 1..20: note = Synthetic
  source 1..20: mol_type = other RNA
gattcgagaaaaccgcagtg

SEQ ID NO: 1348 - RNA, 20 nt, synthetic construct
  misc_feature 1..20: note = Synthetic
  source 1..20: mol_type = other RNA
gccagggagcgctacgatgg

SEQ ID NO: 1349 - RNA, 20 nt, synthetic construct
  misc_feature 1..20: note = Synthetic
  source 1..20: mol_type = other RNA
atggaggcgctaatggcccg

SEQ ID NO: 1350 - RNA, 20 nt, synthetic construct
  misc_feature 1..20: note = Synthetic
  source 1..20: mol_type = other RNA
gatgatgggcgacggcgcgg

SEQ ID NO: 1351 - RNA, 20 nt, synthetic construct
  misc_feature 1..20: note = Synthetic
  source 1..20: mol_type = other RNA
tacgatgatgaccgcaagtg

SEQ ID NO: 1352 - RNA, 20 nt, synthetic construct
  misc_feature 1..20: note = Synthetic
  source 1..20: mol_type = other RNA
accatgcggaagccacgctg

SEQ ID NO: 1353 - RNA, 20 nt, synthetic construct
  misc_feature 1..20: note = Synthetic
  source 1..20: mol_type = other RNA
gtccgtccttaccgtcaaag

SEQ ID NO: 1354 - RNA, 20 nt, synthetic construct
  misc_feature 1..20: note = Synthetic
  source 1..20: mol_type = other RNA
tccttcagcgttgccgccca

SEQ ID NO: 1355 - RNA, 20 nt, synthetic construct
  misc_feature 1..20: note = Synthetic
  source 1..20: mol_type = other RNA
cttgatgatgggcgacggcg

SEQ ID NO: 1356 - RNA, 20 nt, synthetic construct
  misc_feature 1..20: note = Synthetic
  source 1..20: mol_type = other RNA
accagcggtagccatccgtg

SEQ ID NO: 1357 - RNA, 20 nt, synthetic construct
  misc_feature 1..20: note = Synthetic
  source 1..20: mol_type = other RNA
cttggggtaccctcgctcca

SEQ ID NO: 1358 - RNA, 20 nt, synthetic construct
  misc_feature 1..20: note = Synthetic
  source 1..20: mol_type = other RNA
gccgccctgcaggtccacga

SEQ ID NO: 1359 - RNA, 20 nt, synthetic construct
  misc_feature 1..20: note = Synthetic
  source 1..20: mol_type = other RNA
gatgccgtcgtggacctgca

SEQ ID NO: 1360 - RNA, 20 nt, synthetic construct
  misc_feature 1..20: note = Synthetic
  source 1..20: mol_type = other RNA
ttgtcccacttgggcttgcg

SEQ ID NO: 1361 - RNA, 20 nt, synthetic construct
  misc_feature 1..20: note = Synthetic
  source 1..20: mol_type = other RNA
gagtccgtccttaccgtcaa

SEQ ID NO: 1362 - RNA, 20 nt, synthetic construct
  misc_feature 1..20: note = Synthetic
  source 1..20: mol_type = other RNA
gacgatgagctatggacctt

SEQ ID NO: 1363 - RNA, 20 nt, synthetic construct
  misc_feature 1..20: note = Synthetic
  source 1..20: mol_type = other RNA
accatgggcggcaacgctga

SEQ ID NO: 1364 - RNA, 20 nt, synthetic construct
  misc_feature 1..20: note = Synthetic
  source 1..20: mol_type = other RNA
acggatggctaccgctggtg

SEQ ID NO: 1365 - RNA, 20 nt, synthetic construct
  misc_feature 1..20: note = Synthetic
  source 1..20: mol_type = other RNA
accacatctttccgtcactg

SEQ ID NO: 1366 - RNA, 20 nt, synthetic construct
  misc_feature 1..20: note = Synthetic
  source 1..20: mol_type = other RNA
ctacgatgatgaccgcaagt

SEQ ID NO: 1367 - RNA, 20 nt, synthetic construct
  misc_feature 1..20: note = Synthetic
  source 1..20: mol_type = other RNA
gatggcatcgctcagatccg

SEQ ID NO: 1368 - RNA, 20 nt, synthetic construct
  misc_feature 1..20: note = Synthetic
  source 1..20: mol_type = other RNA
aaagattgatgcggtatacg

SEQ ID NO: 1369 - RNA, 20 nt, synthetic construct
  misc_feature 1..20: note = Synthetic
  source 1..20: mol_type = other RNA
cgacggcatccaggttatcg

SEQ ID NO: 1370 - RNA, 20 nt, synthetic construct
  misc_feature 1..20: note = Synthetic
  source 1..20: mol_type = other RNA
gccgcagcgtggcttccgca

SEQ ID NO: 1371 - RNA, 20 nt, synthetic construct
  misc_feature 1..20: note = Synthetic
  source 1..20: mol_type = other RNA
tgacgatgagctatggacct

SEQ ID NO: 1372 - RNA, 20 nt, synthetic construct
  misc_feature 1..20: note = Synthetic
  source 1..20: mol_type = other RNA
ttagtggtccgtgtgaagta

SEQ ID NO: 1373 - RNA, 20 nt, synthetic construct
  misc_feature 1..20: note = Synthetic
  source 1..20: mol_type = other RNA
agtggcacccaccggtctca

SEQ ID NO: 1374 - RNA, 20 nt, synthetic construct
  misc_feature 1..20: note = Synthetic
  source 1..20: mol_type = other RNA
gccgcagtgacggaaagatg

SEQ ID NO: 1375 - RNA, 20 nt, synthetic construct
  misc_feature 1..20: note = Synthetic
  source 1..20: mol_type = other RNA
agggcctcgtaccttggtca

SEQ ID NO: 1376 - RNA, 20 nt, synthetic construct
  misc_feature 1..20: note = Synthetic
  source 1..20: mol_type = other RNA
caaactcgtgggctgccacg

SEQ ID NO: 1377 - RNA, 20 nt, synthetic construct
  misc_feature 1..20: note = Synthetic
  source 1..20: mol_type = other RNA
catggcgtggccaaactcgt

SEQ ID NO: 1378 - RNA, 20 nt, synthetic construct
  misc_feature 1..20: note = Synthetic
  source 1..20: mol_type = other RNA
tccactcgctggacatcagg

SEQ ID NO: 1379 - RNA, 20 nt, synthetic construct
  misc_feature 1..20: note = Synthetic
  source 1..20: mol_type = other RNA
taaaggcggcatccactcgc

SEQ ID NO: 1380 - RNA, 20 nt, synthetic construct
  misc_feature 1..20: note = Synthetic
  source 1..20: mol_type = other RNA
atggcccggggcgcgctcac

SEQ ID NO: 1381 - RNA, 20 nt, synthetic construct
  misc_feature 1..20: note = Synthetic
  source 1..20: mol_type = other RNA
gcgcgctcacgggtcccctg

SEQ ID NO: 1382 - RNA, 20 nt, synthetic construct
  misc_feature 1..20: note = Synthetic
  source 1..20: mol_type = other RNA
tcgccggggaacttgatgat

SEQ ID NO: 1383 - RNA, 20 nt, synthetic construct
  misc_feature 1..20: note = Synthetic
  source 1..20: mol_type = other RNA
tggcttccgcatggtctcga

SEQ ID NO: 1384 - RNA, 20 nt, synthetic construct
  misc_feature 1..20: note = Synthetic
  source 1..20: mol_type = other RNA
tggattcgagaaaaccgcag

SEQ ID NO: 1385 - RNA, 20 nt, synthetic construct
  misc_feature 1..20: note = Synthetic
  source 1..20: mol_type = other RNA
cggttttctcgaatccatga

SEQ ID NO: 1386 - RNA, 20 nt, synthetic construct
  misc_feature 1..20: note = Synthetic
  source 1..20: mol_type = other RNA
tgaagtatgggaacgccgat

SEQ ID NO: 1387 - RNA, 20 nt, synthetic construct
  misc_feature 1..20: note = Synthetic
  source 1..20: mol_type = other RNA
gaagtatgggaacgccgatg

SEQ ID NO: 1388 - RNA, 20 nt, synthetic construct
  misc_feature 1..20: note = Synthetic
  source 1..20: mol_type = other RNA
cctcagtggtgccgcaccag

SEQ ID NO: 1389 - RNA, 20 nt, synthetic construct
  misc_feature 1..20: note = Synthetic
  source 1..20: mol_type = other RNA
tacgaccgcgacaagaagta

SEQ ID NO: 1390 - RNA, 20 nt, synthetic construct
  misc_feature 1..20: note = Synthetic
  source 1..20: mol_type = other RNA
gctcccggaaaagattgatg

SEQ ID NO: 1391 - RNA, 20 nt, synthetic construct
  misc_feature 1..20: note = Synthetic
  source 1..20: mol_type = other RNA
gcttggggtaccctcgctcc

SEQ ID NO: 1392 - RNA, 20 nt, synthetic construct
  misc_feature 1..20: note = Synthetic
  source 1..20: mol_type = other RNA
gtacgagctggatacccaag

SEQ ID NO: 1393 - RNA, 20 nt, synthetic construct
  misc_feature 1..20: note = Synthetic
  source 1..20: mol_type = other RNA
aatcctactgttgctgtgcg

SEQ ID NO: 1394 - RNA, 20 nt, synthetic construct
  misc_feature 1..20: note = Synthetic
  source 1..20: mol_type = other RNA
cacggttggagggaaaccta

SEQ ID NO: 1395 - RNA, 20 nt, synthetic construct
  misc_feature 1..20: note = Synthetic
  source 1..20: mol_type = other RNA
cttgctagtaacttcatatg

SEQ ID NO: 1396 - RNA, 20 nt, synthetic construct
  misc_feature 1..20: note = Synthetic
  source 1..20: mol_type = other RNA
caggttccgtgggtaccagg

SEQ ID NO: 1397 - RNA, 20 nt, synthetic construct
  misc_feature 1..20: note = Synthetic
  source 1..20: mol_type = other RNA
tatgcggcatccacgcctga

SEQ ID NO: 1398 - RNA, 20 nt, synthetic construct
  misc_feature 1..20: note = Synthetic
  source 1..20: mol_type = other RNA
tcgattttcctcacggttgg

SEQ ID NO: 1399 - RNA, 20 nt, synthetic construct
  misc_feature 1..20: note = Synthetic
  source 1..20: mol_type = other RNA
tgctcagcctatccattgga

SEQ ID NO: 1400 - RNA, 20 nt, synthetic construct
  misc_feature 1..20: note = Synthetic
  source 1..20: mol_type = other RNA
cgattttcctcacggttgga

SEQ ID NO: 1401 - RNA, 20 nt, synthetic construct
  misc_feature 1..20: note = Synthetic
  source 1..20: mol_type = other RNA
aatcaattctgggctatcag

SEQ ID NO: 1402 - RNA, 20 nt, synthetic construct
  misc_feature 1..20: note = Synthetic
  source 1..20: mol_type = other RNA
gcgcatcacctccagagtgt

SEQ ID NO: 1403 - RNA, 20 nt, synthetic construct
  misc_feature 1..20: note = Synthetic
  source 1..20: mol_type = other RNA
tcacggttggagggaaacct

SEQ ID NO: 1404 - RNA, 20 nt, synthetic construct
  misc_feature 1..20: note = Synthetic
  source 1..20: mol_type = other RNA
acttttggcgcaaatccctc

SEQ ID NO: 1405 - RNA, 20 nt, synthetic construct
  misc_feature 1..20: note = Synthetic
  source 1..20: mol_type = other RNA
gagacaggcggaaccgagtc

SEQ ID NO: 1406 - RNA, 20 nt, synthetic construct
  misc_feature 1..20: note = Synthetic
  source 1..20: mol_type = other RNA
tacctgaacaaggttcatgc

SEQ ID NO: 1407 - RNA, 20 nt, synthetic construct
  misc_feature 1..20: note = Synthetic
  source 1..20: mol_type = other RNA
gcatcgattttcctcacggt

SEQ ID NO: 1408 - RNA, 20 nt, synthetic construct
  misc_feature 1..20: note = Synthetic
  source 1..20: mol_type = other RNA
cgcatatgaagttactagca

SEQ ID NO: 1409 - RNA, 20 nt, synthetic construct
  misc_feature 1..20: note = Synthetic
  source 1..20: mol_type = other RNA
tctggagggacaggttccgt

SEQ ID NO: 1410 - RNA, 20 nt, synthetic construct
  misc_feature 1..20: note = Synthetic
  source 1..20: mol_type = other RNA
tgggcatctccattaatccc

SEQ ID NO: 1411 - RNA, 20 nt, synthetic construct
  misc_feature 1..20: note = Synthetic
  source 1..20: mol_type = other RNA
gaagctggactccgacactc

SEQ ID NO: 1412 - RNA, 20 nt, synthetic construct
  misc_feature 1..20: note = Synthetic
  source 1..20: mol_type = other RNA
tgcagctccatccaatggat

SEQ ID NO: 1413 - RNA, 20 nt, synthetic construct
  misc_feature 1..20: note = Synthetic
  source 1..20: mol_type = other RNA
tcacagttggctggcgtccc

SEQ ID NO: 1414 - RNA, 20 nt, synthetic construct
  misc_feature 1..20: note = Synthetic
  source 1..20: mol_type = other RNA
ttctggagggacaggttccg

SEQ ID NO: 1415 - RNA, 20 nt, synthetic construct
  misc_feature 1..20: note = Synthetic
  source 1..20: mol_type = other RNA
gcatgggccaaaacatttcc

SEQ ID NO: 1416 - RNA, 20 nt, synthetic construct
  misc_feature 1..20: note = Synthetic
  source 1..20: mol_type = other RNA
gttctgaagtgaccaacatc

SEQ ID NO: 1417 - RNA, 20 nt, synthetic construct
  misc_feature 1..20: note = Synthetic
  source 1..20: mol_type = other RNA
caccagcatgaaccttgttc

SEQ ID NO: 1418 - RNA, 20 nt, synthetic construct
  misc_feature 1..20: note = Synthetic
  source 1..20: mol_type = other RNA
cgatgaggatgaacgctgga

SEQ ID NO: 1419 - RNA, 20 nt, synthetic construct
  misc_feature 1..20: note = Synthetic
  source 1..20: mol_type = other RNA
atgattggctttgcgcgagg

SEQ ID NO: 1420 - RNA, 20 nt, synthetic construct
  misc_feature 1..20: note = Synthetic
  source 1..20: mol_type = other RNA
atcatgattggctttgcgcg

SEQ ID NO: 1421 - RNA, 20 nt, synthetic construct
  misc_feature 1..20: note = Synthetic
  source 1..20: mol_type = other RNA
aatcgatccactgtaatatg

SEQ ID NO: 1422 - RNA, 20 nt, synthetic construct
  misc_feature 1..20: note = Synthetic
  source 1..20: mol_type = other RNA
agacttaccgcatattacag

SEQ ID NO: 1423 - RNA, 20 nt, synthetic construct
  misc_feature 1..20: note = Synthetic
  source 1..20: mol_type = other RNA
gttcatgagttgcagcatac

SEQ ID NO: 1424 - RNA, 20 nt, synthetic construct
  misc_feature 1..20: note = Synthetic
  source 1..20: mol_type = other RNA
agtggatcgattagtgtcaa

SEQ ID NO: 1425 - RNA, 20 nt, synthetic construct
  misc_feature 1..20: note = Synthetic
  source 1..20: mol_type = other RNA
gcagtgatgtatccaaccta

SEQ ID NO: 1426 - RNA, 20 nt, synthetic construct
  misc_feature 1..20: note = Synthetic
  source 1..20: mol_type = other RNA
tgatgggccaggaaacacgc

SEQ ID NO: 1427 - RNA, 20 nt, synthetic construct
  misc_feature 1..20: note = Synthetic
  source 1..20: mol_type = other RNA
catcactgcattaggatcag

SEQ ID NO: 1428 - RNA, 20 nt, synthetic construct
  misc_feature 1..20: note = Synthetic
  source 1..20: mol_type = other RNA
tggacggatggtagcagtct

SEQ ID NO: 1429 - RNA, 20 nt, synthetic construct
  misc_feature 1..20: note = Synthetic
  source 1..20: mol_type = other RNA
aggagatgctcacttcgatg

SEQ ID NO: 1430 - RNA, 20 nt, synthetic construct
  misc_feature 1..20: note = Synthetic
  source 1..20: mol_type = other RNA
ctgcattatttctatgacgc

SEQ ID NO: 1431 - RNA, 20 nt, synthetic construct
  misc_feature 1..20: note = Synthetic
  source 1..20: mol_type = other RNA
gggactcctacccatttgat

SEQ ID NO: 1432 - RNA, 20 nt, synthetic construct
  misc_feature 1..20: note = Synthetic
  source 1..20: mol_type = other RNA
cttccaaagtggtcacctac

SEQ ID NO: 1433 - RNA, 20 nt, synthetic construct
  misc_feature 1..20: note = Synthetic
  source 1..20: mol_type = other RNA
ggggactcctacccatttga

SEQ ID NO: 1434 - RNA, 20 nt, synthetic construct
  misc_feature 1..20: note = Synthetic
  source 1..20: mol_type = other RNA
tctgcattatttctatgacg

SEQ ID NO: 1435 - RNA, 20 nt, synthetic construct
  misc_feature 1..20: note = Synthetic
  source 1..20: mol_type = other RNA
tcctacccatttgatgggcc

SEQ ID NO: 1436 - RNA, 20 nt, synthetic construct
  misc_feature 1..20: note = Synthetic
  source 1..20: mol_type = other RNA
agtgagtattctgcaacatc

SEQ ID NO: 1437 - RNA, 20 nt, synthetic construct
  misc_feature 1..20: note = Synthetic
  source 1..20: mol_type = other RNA
gatgctatcaccacactccg

SEQ ID NO: 1438 - RNA, 20 nt, synthetic construct
  misc_feature 1..20: note = Synthetic
  source 1..20: mol_type = other RNA
gcaaccagtatcagtctaca

SEQ ID NO: 1439 - RNA, 20 nt, synthetic construct
  misc_feature 1..20: note = Synthetic
  source 1..20: mol_type = other RNA
tcaattgcttggacgctgct

SEQ ID NO: 1440 - RNA, 20 nt, synthetic construct
  misc_feature 1..20: note = Synthetic
  source 1..20: mol_type = other RNA
agttagtgcgttcccacttg

SEQ ID NO: 1441 - RNA, 20 nt, synthetic construct
  misc_feature 1..20: note = Synthetic
  source 1..20: mol_type = other RNA
atgatgaaaaagcctcgctg

SEQ ID NO: 1442 - RNA, 20 nt, synthetic construct
  misc_feature 1..20: note = Synthetic
  source 1..20: mol_type = other RNA
tgtgacggggaagccaaatg

SEQ ID NO: 1443 - RNA, 20 nt, synthetic construct
  misc_feature 1..20: note = Synthetic
  source 1..20: mol_type = other RNA
cagcctgtataccagttgga

SEQ ID NO: 1444 - RNA, 20 nt, synthetic construct
  misc_feature 1..20: note = Synthetic
  source 1..20: mol_type = other RNA
ttggtccagtaggttggata

SEQ ID NO: 1445 - RNA, 20 nt, synthetic construct
  misc_feature 1..20: note = Synthetic
  source 1..20: mol_type = other RNA
ctccctcaagatgacatcga

SEQ ID NO: 1446 - RNA, 20 nt, synthetic construct
  misc_feature 1..20: note = Synthetic
  source 1..20: mol_type = other RNA
gtagactgatactggttgct

SEQ ID NO: 1447 - RNA, 20 nt, synthetic construct
  misc_feature 1..20: note = Synthetic
  source 1..20: mol_type = other RNA
aagtatttctccacggagtg

SEQ ID NO: 1448 - RNA, 20 nt, synthetic construct
  misc_feature 1..20: note = Synthetic
  source 1..20: mol_type = other RNA
atgccatcgatgtcatcttg

SEQ ID NO: 1449 - RNA, 20 nt, synthetic construct
  misc_feature 1..20: note = Synthetic
  source 1..20: mol_type = other RNA
cttgattaacttacttgcgg

SEQ ID NO: 1450 - RNA, 20 nt, synthetic construct
  misc_feature 1..20: note = Synthetic
  source 1..20: mol_type = other RNA
accctagagatatcacctgt

SEQ ID NO: 1451 - RNA, 20 nt, synthetic construct
  misc_feature 1..20: note = Synthetic
  source 1..20: mol_type = other RNA
ggtggttttatgttaacccc

SEQ ID NO: 1452 - RNA, 20 nt, synthetic construct
  misc_feature 1..20: note = Synthetic
  source 1..20: mol_type = other RNA
taagcagcctgtataccagt

SEQ ID NO: 1453 - RNA, 20 nt, synthetic construct
  misc_feature 1..20: note = Synthetic
  source 1..20: mol_type = other RNA
agcatagttgggatacatca

SEQ ID NO: 1454 - RNA, 20 nt, synthetic construct
  misc_feature 1..20: note = Synthetic
  source 1..20: mol_type = other RNA
cccaaggatatatcaaacta

SEQ ID NO: 1455 - RNA, 20 nt, synthetic construct
  misc_feature 1..20: note = Synthetic
  source 1..20: mol_type = other RNA
aacgcactaacttgacctac

SEQ ID NO: 1456 - RNA, 20 nt, synthetic construct
  misc_feature 1..20: note = Synthetic
  source 1..20: mol_type = other RNA
ggttatcccaaaagcatatc

SEQ ID NO: 1457 - RNA, 20 nt, synthetic construct
  misc_feature 1..20: note = Synthetic
  source 1..20: mol_type = other RNA
gatatgcttttgggataacc

SEQ ID NO: 1458 - RNA, 20 nt, synthetic construct
  misc_feature 1..20: note = Synthetic
  source 1..20: mol_type = other RNA
atcccttccaactggtatac

SEQ ID NO: 1459 - RNA, 20 nt, synthetic construct
  misc_feature 1..20: note = Synthetic
  source 1..20: mol_type = other RNA
aagttagtgcgttcccactt

SEQ ID NO: 1460 - RNA, 20 nt, synthetic construct
  misc_feature 1..20: note = Synthetic
  source 1..20: mol_type = other RNA
tttttgggttgaatgtgacg

SEQ ID NO: 1461 - RNA, 20 nt, synthetic construct
  misc_feature 1..20: note = Synthetic
  source 1..20: mol_type = other RNA
tgccatcgatgtcatcttga

SEQ ID NO: 1462 - RNA, 20 nt, synthetic construct
  misc_feature 1..20: note = Synthetic
  source 1..20: mol_type = other RNA
caagttagtgcgttcccact

SEQ ID NO: 1463 - RNA, 20 nt, synthetic construct
  misc_feature 1..20: note = Synthetic
  source 1..20: mol_type = other RNA
aaacagctgcgtcaattgct

SEQ ID NO: 1464 - RNA, 20 nt, synthetic construct
  misc_feature 1..20: note = Synthetic
  source 1..20: mol_type = other RNA
attgacaggcaaccaatact

SEQ ID NO: 1465 - RNA, 20 nt, synthetic construct
  misc_feature 1..20: note = Synthetic
  source 1..20: mol_type = other RNA
ccgttaggtacttctggaga

SEQ ID NO: 1466 - RNA, 20 nt, synthetic construct
  misc_feature 1..20: note = Synthetic
  source 1..20: mol_type = other RNA
aaatgtcaaactggggtcac

SEQ ID NO: 1467 - RNA, 20 nt, synthetic construct
  misc_feature 1..20: note = Synthetic
  source 1..20: mol_type = other RNA
cttggtccagtaggttggat

SEQ ID NO: 1468 - RNA, 20 nt, synthetic construct
  misc_feature 1..20: note = Synthetic
  source 1..20: mol_type = other RNA
gtatcccaactatgctttca

SEQ ID NO: 1469 - RNA, 20 nt, synthetic construct
  misc_feature 1..20: note = Synthetic
  source 1..20: mol_type = other RNA
ggcatgagcaaggattccat

SEQ ID NO: 1470 - RNA, 20 nt, synthetic construct
  misc_feature 1..20: note = Synthetic
  source 1..20: mol_type = other RNA
gtttacgttacctccagaat

SEQ ID NO: 1471 - RNA, 20 nt, synthetic construct
  misc_feature 1..20: note = Synthetic
  source 1..20: mol_type = other RNA
gtcaattgcttggacgctgc

SEQ ID NO: 1472 - RNA, 20 nt, synthetic construct
  misc_feature 1..20: note = Synthetic
  source 1..20: mol_type = other RNA
taacttacttgcggaggtgt

SEQ ID NO: 1473 - RNA, 20 nt, synthetic construct
  misc_feature 1..20: note = Synthetic
  source 1..20: mol_type = other RNA
agatcaaatgcgtaatatct

SEQ ID NO: 1474 - RNA, 20 nt, synthetic construct
  misc_feature 1..20: note = Synthetic
  source 1..20: mol_type = other RNA
tttcctacttacgttcttgc

SEQ ID NO: 1475 - RNA, 20 nt, synthetic construct
  misc_feature 1..20: note = Synthetic
  source 1..20: mol_type = other RNA
caagttcatgagcagcaacg

SEQ ID NO: 1476 - RNA, 20 nt, synthetic construct
  misc_feature 1..20: note = Synthetic
  source 1..20: mol_type = other RNA
gtacaagcaggttatccaag

SEQ ID NO: 1477 - RNA, 20 nt, synthetic construct
  misc_feature 1..20: note = Synthetic
  source 1..20: mol_type = other RNA
tcacatcatcttgcgaaagg

SEQ ID NO: 1478 - RNA, 20 nt, synthetic construct
  misc_feature 1..20: note = Synthetic
  source 1..20: mol_type = other RNA
ttgcagcggacaaatactgg

SEQ ID NO: 1479 - RNA, 20 nt, synthetic construct
  misc_feature 1..20: note = Synthetic
  source 1..20: mol_type = other RNA
atcttgcgaaaggcggaact

SEQ ID NO: 1480 - RNA, 20 nt, synthetic construct
  misc_feature 1..20: note = Synthetic
  source 1..20: mol_type = other RNA
agtcatcagctattagtcta

SEQ ID NO: 1481 - RNA, 20 nt, synthetic construct
  misc_feature 1..20: note = Synthetic
  source 1..20: mol_type = other RNA
gagctgaagtgaccaacgtc

SEQ ID NO: 1482 - RNA, 20 nt, synthetic construct
  misc_feature 1..20: note = Synthetic
  source 1..20: mol_type = other RNA
tccaagaggcatccataccc

SEQ ID NO: 1483 - RNA, 20 nt, synthetic construct
  misc_feature 1..20: note = Synthetic
  source 1..20: mol_type = other RNA
atttttggcgaagatcccac

SEQ ID NO: 1484 - RNA, 20 nt, synthetic construct
  misc_feature 1..20: note = Synthetic
  source 1..20: mol_type = other RNA
gctggcatctcagatcccga

SEQ ID NO: 1485 - RNA, 20 nt, synthetic construct
  misc_feature 1..20: note = Synthetic
  source 1..20: mol_type = other RNA
aagtcatcagctattagtct

SEQ ID NO: 1486 - RNA, 20 nt, synthetic construct
  misc_feature 1..20: note = Synthetic
  source 1..20: mol_type = other RNA
caccaggggttcctcagtag

SEQ ID NO: 1487 - RNA, 20 nt, synthetic construct
  misc_feature 1..20: note = Synthetic
  source 1..20: mol_type = other RNA
cattcacatcatcttgcgaa

SEQ ID NO: 1488 - RNA, 20 nt, synthetic construct
  misc_feature 1..20: note = Synthetic
  source 1..20: mol_type = other RNA
cctttcctggcatgccgaag

SEQ ID NO: 1489 - RNA, 20 nt, synthetic construct
  misc_feature 1..20: note = Synthetic
  source 1..20: mol_type = other RNA
aaagtactacaacctcgaaa

SEQ ID NO: 1490 - RNA, 20 nt, synthetic construct
  misc_feature 1..20: note = Synthetic
  source 1..20: mol_type = other RNA
ctccaacaaggatcttgccc

SEQ ID NO: 1491 - RNA, 20 nt, synthetic construct
  misc_feature 1..20: note = Synthetic
  source 1..20: mol_type = other RNA
ctgcatatgaagttaacagc

SEQ ID NO: 1492 - RNA, 20 nt, synthetic construct
  misc_feature 1..20: note = Synthetic
  source 1..20: mol_type = other RNA
tgcctctactgaggaacccc

SEQ ID NO: 1493 - RNA, 20 nt, synthetic construct
  misc_feature 1..20: note = Synthetic
  source 1..20: mol_type = other RNA
tacctgggcaagatccttgt

SEQ ID NO: 1494 - RNA, 20 nt, synthetic construct
  misc_feature 1..20: note = Synthetic
  source 1..20: mol_type = other RNA
tcaaccttaggctcaactcc

SEQ ID NO: 1495 - RNA, 20 nt, synthetic construct
  misc_feature 1..20: note = Synthetic
  source 1..20: mol_type = other RNA
tctttgcagcggacaaatac

SEQ ID NO: 1496 - RNA, 20 nt, synthetic construct
  misc_feature 1..20: note = Synthetic
  source 1..20: mol_type = other RNA
tgggttttcctccaaccata

SEQ ID NO: 1497 - RNA, 20 nt, synthetic construct
  misc_feature 1..20: note = Synthetic
  source 1..20: mol_type = other RNA
catcttgcgaaaggcggaac

SEQ ID NO: 1498 - RNA, 20 nt, synthetic construct
  misc_feature 1..20: note = Synthetic
  source 1..20: mol_type = other RNA
cacacctgacatgaaccgtg

SEQ ID NO: 1499 - RNA, 20 nt, synthetic construct
  misc_feature 1..20: note = Synthetic
  source 1..20: mol_type = other RNA
ctctctgctgatgacatacg

SEQ ID NO: 1500 - RNA, 20 nt, synthetic construct
  misc_feature 1..20: note = Synthetic
  source 1..20: mol_type = other RNA
aagtaggtcctataaaaacg

SEQ ID NO: 1501 - RNA, 20 nt, synthetic construct
  misc_feature 1..20: note = Synthetic
  source 1..20: mol_type = other RNA
atgatgcacgcacctcgatg

SEQ ID NO: 1502 - RNA, 20 nt, synthetic construct
  misc_feature 1..20: note = Synthetic
  source 1..20: mol_type = other RNA
agtaggtcctataaaaacgt

SEQ ID NO: 1503 - RNA, 20 nt, synthetic construct
  misc_feature 1..20: note = Synthetic
  source 1..20: mol_type = other RNA
tcagtgttttggtgatacgt

SEQ ID NO: 1504 - RNA, 20 nt, synthetic construct
  misc_feature 1..20: note = Synthetic
  source 1..20: mol_type = other RNA
tgtcaggatttggcaagcgt

SEQ ID NO: 1505 - RNA, 20 nt, synthetic construct
  misc_feature 1..20: note = Synthetic
  source 1..20: mol_type = other RNA
cgtggcattcagtccctgta

SEQ ID NO: 1506 - RNA, 20 nt, synthetic construct
  misc_feature 1..20: note = Synthetic
  source 1..20: mol_type = other RNA
tggccattctagtgatccaa

SEQ ID NO: 1507 - RNA, 20 nt, synthetic construct
  misc_feature 1..20: note = Synthetic
  source 1..20: mol_type = other RNA
aggatgttgactacgcaatc

SEQ ID NO: 1508 - RNA, 20 nt, synthetic construct
  misc_feature 1..20: note = Synthetic
  source 1..20: mol_type = other RNA
acatcggggactccacatcg

SEQ ID NO: 1509 - RNA, 20 nt, synthetic construct
  misc_feature 1..20: note = Synthetic
  source 1..20: mol_type = other RNA
taatcagtttgggataacca

SEQ ID NO: 1510 - RNA, 20 nt, synthetic construct
  misc_feature 1..20: note = Synthetic
  source 1..20: mol_type = other RNA
gtggggaacattacggcctt

SEQ ID NO: 1511 - RNA, 20 nt, synthetic construct
  misc_feature 1..20: note = Synthetic
  source 1..20: mol_type = other RNA
catacaccaacgttacctgt

SEQ ID NO: 1512 - RNA, 20 nt, synthetic construct
  misc_feature 1..20: note = Synthetic
  source 1..20: mol_type = other RNA
tttgatgctgtcactaccgt

SEQ ID NO: 1513 - RNA, 20 nt, synthetic construct
  misc_feature 1..20: note = Synthetic
  source 1..20: mol_type = other RNA
ttggtggtttttgcccgtgg

SEQ ID NO: 1514 - RNA, 20 nt, synthetic construct
  misc_feature 1..20: note = Synthetic
  source 1..20: mol_type = other RNA
tgccaggggggcccgtatgg

SEQ ID NO: 1515 - RNA, 20 nt, synthetic construct
  misc_feature 1..20: note = Synthetic
  source 1..20: mol_type = other RNA
ccctgaaatgatggacatcg

SEQ ID NO: 1516 - RNA, 20 nt, synthetic construct
  misc_feature 1..20: note = Synthetic
  source 1..20: mol_type = other RNA
gcaactggacacatctaccc

SEQ ID NO: 1517 - RNA, 20 nt, synthetic construct
  misc_feature 1..20: note = Synthetic
  source 1..20: mol_type = other RNA
gaggtgcgtgcatcatctcc

SEQ ID NO: 1518 - RNA, 20 nt, synthetic construct
  misc_feature 1..20: note = Synthetic
  source 1..20: mol_type = other RNA
gtaatcagtttgggataacc

SEQ ID NO: 1519 - RNA, 20 nt, synthetic construct
  misc_feature 1..20: note = Synthetic
  source 1..20: mol_type = other RNA
ttttgatgctgtcactaccg

SEQ ID NO: 1520 - RNA, 20 nt, synthetic construct
  misc_feature 1..20: note = Synthetic
  source 1..20: mol_type = other RNA
cggcctttggatcactagaa

SEQ ID NO: 1521 - RNA, 20 nt, synthetic construct
  misc_feature 1..20: note = Synthetic
  source 1..20: mol_type = other RNA
actagaatggccaagaccta

SEQ ID NO: 1522 - RNA, 20 nt, synthetic construct
  misc_feature 1..20: note = Synthetic
  source 1..20: mol_type = other RNA
atttcgatgaggacgaattc

SEQ ID NO: 1523 - RNA, 20 nt, synthetic construct
  misc_feature 1..20: note = Synthetic
  source 1..20: mol_type = other RNA
gggtaacattactccatact

SEQ ID NO: 1524 - RNA, 20 nt, synthetic construct
  misc_feature 1..20: note = Synthetic
  source 1..20: mol_type = other RNA
aggggatgcacatttcgatg

SEQ ID NO: 1525 - RNA, 20 nt, synthetic construct
  misc_feature 1..20: note = Synthetic
  source 1..20: mol_type = other RNA
ttgcgtagtcaacatcctca

SEQ ID NO: 1526 - RNA, 20 nt, synthetic construct
  misc_feature 1..20: note = Synthetic
  source 1..20: mol_type = other RNA
acatcctcacggttcatgtc

SEQ ID NO: 1527 - RNA, 20 nt, synthetic construct
  misc_feature 1..20: note = Synthetic
  source 1..20: mol_type = other RNA
aaatgccaggggggcccgta

SEQ ID NO: 1528 - RNA, 20 nt, synthetic construct
  misc_feature 1..20: note = Synthetic
  source 1..20: mol_type = other RNA
cccgattccttggaagttct

SEQ ID NO: 1529 - RNA, 20 nt, synthetic construct
  misc_feature 1..20: note = Synthetic
  source 1..20: mol_type = other RNA
ttatggccaaccttgccatc

SEQ ID NO: 1530 - RNA, 20 nt, synthetic construct
  misc_feature 1..20: note = Synthetic
  source 1..20: mol_type = other RNA
ctcactgctgttcacgagat

SEQ ID NO: 1531 - RNA, 20 nt, synthetic construct
  misc_feature 1..20: note = Synthetic
  source 1..20: mol_type = other RNA
ccccgatgtccatcatttca

SEQ ID NO: 1532 - RNA, 20 nt, synthetic construct
  misc_feature 1..20: note = Synthetic
  source 1..20: mol_type = other RNA
aagaattcaactcaccatac

SEQ ID NO: 1533 - RNA, 20 nt, synthetic construct
  misc_feature 1..20: note = Synthetic
  source 1..20: mol_type = other RNA
cctgaacagctctacaagcc

SEQ ID NO: 1534 - RNA, 20 nt, synthetic construct
  misc_feature 1..20: note = Synthetic
  source 1..20: mol_type = other RNA
ttttggtgatacgttggagt

SEQ ID NO: 1535 - RNA, 20 nt, synthetic construct
  misc_feature 1..20: note = Synthetic
  source 1..20: mol_type = other RNA
caattttaggcccgattcct

SEQ ID NO: 1536 - RNA, 20 nt, synthetic construct
  misc_feature 1..20: note = Synthetic
  source 1..20: mol_type = other RNA
cacgagattggccattcctt

SEQ ID NO: 1537 - RNA, 20 nt, synthetic construct
  misc_feature 1..20: note = Synthetic
  source 1..20: mol_type = other RNA
tccccgatgtccatcatttc

SEQ ID NO: 1538 - RNA, 20 nt, synthetic construct
  misc_feature 1..20: note = Synthetic
  source 1..20: mol_type = other RNA
ggcaagcgttggttctcttt

SEQ ID NO: 1539 - RNA, 20 nt, synthetic construct
  misc_feature 1..20: note = Synthetic
  source 1..20: mol_type = other RNA
gcaagcgttggttctctttt

SEQ ID NO: 1540 - RNA, 20 nt, synthetic construct
  misc_feature 1..20: note = Synthetic
  source 1..20: mol_type = other RNA
ctagcccatgcttttggacc

SEQ ID NO: 1541 - RNA, 20 nt, synthetic construct
  misc_feature 1..20: note = Synthetic
  source 1..20: mol_type = other RNA
tggtttttgcccgtggaggt

SEQ ID NO: 1542 - RNA, 20 nt, synthetic construct
  misc_feature 1..20: note = Synthetic
  source 1..20: mol_type = other RNA
aattttaccagacttcacga

SEQ ID NO: 1543 - RNA, 20 nt, synthetic construct
  misc_feature 1..20: note = Synthetic
  source 1..20: mol_type = other RNA
gatgccattaccagtctccg

SEQ ID NO: 1544 - RNA, 20 nt, synthetic construct
  misc_feature 1..20: note = Synthetic
  source 1..20: mol_type = other RNA
cttaggtcttgaccactcca

SEQ ID NO: 1545 - RNA, 20 nt, synthetic construct
  misc_feature 1..20: note = Synthetic
  source 1..20: mol_type = other RNA
ctaccatcctacaaatctcg

SEQ ID NO: 1546 - RNA, 20 nt, synthetic construct
  misc_feature 1..20: note = Synthetic
  source 1..20: mol_type = other RNA
ttcttcggcttagaggtgac

SEQ ID NO: 1547 - RNA, 20 nt, synthetic construct
  misc_feature 1..20: note = Synthetic
  source 1..20: mol_type = other RNA
ctggcatgacgcgaacaata

SEQ ID NO: 1548 - RNA, 20 nt, synthetic construct
  misc_feature 1..20: note = Synthetic
  source 1..20: mol_type = other RNA
tggaccatttaagagttcga

SEQ ID NO: 1549 - RNA, 20 nt, synthetic construct
  misc_feature 1..20: note = Synthetic
  source 1..20: mol_type = other RNA
taggatggtagtatgatctc

SEQ ID NO: 1550 - RNA, 20 nt, synthetic construct
  misc_feature 1..20: note = Synthetic
  source 1..20: mol_type = other RNA
ttcccgcgagatttgtagga

SEQ ID NO: 1551 - RNA, 20 nt, synthetic construct
  misc_feature 1..20: note = Synthetic
  source 1..20: mol_type = other RNA
tatgcagcatcaatacggtt

SEQ ID NO: 1552 - RNA, 20 nt, synthetic construct
  misc_feature 1..20: note = Synthetic
  source 1..20: mol_type = other RNA
taccatcctacaaatctcgc

SEQ ID NO: 1553 - RNA, 20 nt, synthetic construct
  misc_feature 1..20: note = Synthetic
  source 1..20: mol_type = other RNA
ccgagttaccatagagagac

SEQ ID NO: 1554 - RNA, 20 nt, synthetic construct
  misc_feature 1..20: note = Synthetic
  source 1..20: mol_type = other RNA
ggccagagggcccatcaaat

SEQ ID NO: 1555 - RNA, 20 nt, synthetic construct
  misc_feature 1..20: note = Synthetic
  source 1..20: mol_type = other RNA
ttctcggagcctctcagtca

SEQ ID NO: 1556 - RNA, 20 nt, synthetic construct
  misc_feature 1..20: note = Synthetic
  source 1..20: mol_type = other RNA
cttgttgctgcgcatgagtt

SEQ ID NO: 1557 - RNA, 20 nt, synthetic construct
  misc_feature 1..20: note = Synthetic
  source 1..20: mol_type = other RNA
acctggacaagtagttccaa

SEQ ID NO: 1558 - RNA, 20 nt, synthetic construct
  misc_feature 1..20: note = Synthetic
  source 1..20: mol_type = other RNA
aaagtggcttttgccggtgt

SEQ ID NO: 1559 - RNA, 20 nt, synthetic construct
  misc_feature 1..20: note = Synthetic
  source 1..20: mol_type = other RNA
gcgacttctacccatttgat

SEQ ID NO: 1560 - RNA, 20 nt, synthetic construct
  misc_feature 1..20: note = Synthetic
  source 1..20: mol_type = other RNA
cctcctgggccaaattatgg

SEQ ID NO: 1561 - RNA, 20 nt, synthetic construct
  misc_feature 1..20: note = Synthetic
  source 1..20: mol_type = other RNA
agcaatgccatcgtgaagtc

SEQ ID NO: 1562 - RNA, 20 nt, synthetic construct
  misc_feature 1..20: note = Synthetic
  source 1..20: mol_type = other RNA
atatgcagcatcaatacggt

SEQ ID NO: 1563 - RNA, 20 nt, synthetic construct
  misc_feature 1..20: note = Synthetic
  source 1..20: mol_type = other RNA
acatcaggaaccccgcatct

SEQ ID NO: 1564 - RNA, 20 nt, synthetic construct
  misc_feature 1..20: note = Synthetic
  source 1..20: mol_type = other RNA
aggattcccgcgagatttgt

SEQ ID NO: 1565 - RNA, 20 nt, synthetic construct
  misc_feature 1..20: note = Synthetic
  source 1..20: mol_type = other RNA
tttcctatctacacctacac

SEQ ID NO: 1566 - RNA, 20 nt, synthetic construct
  misc_feature 1..20: note = Synthetic
  source 1..20: mol_type = other RNA
gatactctacctctgcaaac

SEQ ID NO: 1567 - RNA, 20 nt, synthetic construct
  misc_feature 1..20: note = Synthetic
  source 1..20: mol_type = other RNA
cttggagtggtcaagaccta

SEQ ID NO: 1568 - RNA, 20 nt, synthetic construct
  misc_feature 1..20: note = Synthetic
  source 1..20: mol_type = other RNA
aaatctcgcgggaatcctga

SEQ ID NO: 1569 - RNA, 20 nt, synthetic construct
  misc_feature 1..20: note = Synthetic
  source 1..20: mol_type = other RNA
actgcttctcgacatctccg

SEQ ID NO: 1570 - RNA, 20 nt, synthetic construct
  misc_feature 1..20: note = Synthetic
  source 1..20: mol_type = other RNA
gtttcctaccagcccgacca

SEQ ID NO: 1571 - RNA, 20 nt, synthetic construct
  misc_feature 1..20: note = Synthetic
  source 1..20: mol_type = other RNA
agtgaaggatgcttccgtca

SEQ ID NO: 1572 - RNA, 20 nt, synthetic construct
  misc_feature 1..20: note = Synthetic
  source 1..20: mol_type = other RNA
cgaccgctgacaggtgtctg

SEQ ID NO: 1573 - RNA, 20 nt, synthetic construct
  misc_feature 1..20: note = Synthetic
  source 1..20: mol_type = other RNA
ttgatttcatcactgcagcg

SEQ ID NO: 1574 - RNA, 20 nt, synthetic construct
  misc_feature 1..20: note = Synthetic
  source 1..20: mol_type = other RNA
gtaggcacaggtcatcacag

SEQ ID NO: 1575 - RNA, 20 nt, synthetic construct
  misc_feature 1..20: note = Synthetic
  source 1..20: mol_type = other RNA
cagtgaaggatgcttccgtc

SEQ ID NO: 1576 - RNA, 20 nt, synthetic construct
  misc_feature 1..20: note = Synthetic
  source 1..20: mol_type = other RNA
gctgaggtggatcacagtga

SEQ ID NO: 1577 - RNA, 20 nt, synthetic construct
  misc_feature 1..20: note = Synthetic
  source 1..20: mol_type = other RNA
ctactgctgagcatcttgga

SEQ ID NO: 1578 - RNA, 20 nt, synthetic construct
  misc_feature 1..20: note = Synthetic
  source 1..20: mol_type = other RNA
ccgccccagacacctgtcag

SEQ ID NO: 1579 - RNA, 20 nt, synthetic construct
  misc_feature 1..20: note = Synthetic
  source 1..20: mol_type = other RNA
agactgcttctcgacatctc

SEQ ID NO: 1580 - RNA, 20 nt, synthetic construct
  misc_feature 1..20: note = Synthetic
  source 1..20: mol_type = other RNA
tcagcatgctcaggcctgca

SEQ ID NO: 1581 - RNA, 20 nt, synthetic construct
  misc_feature 1..20: note = Synthetic
  source 1..20: mol_type = other RNA
gagcatggatccaaccaccc

SEQ ID NO: 1582 - RNA, 20 nt, synthetic construct
  misc_feature 1..20: note = Synthetic
  source 1..20: mol_type = other RNA
gactgcttctcgacatctcc

SEQ ID NO: 1583 - RNA, 20 nt, synthetic construct
  misc_feature 1..20: note = Synthetic
  source 1..20: mol_type = other RNA
acatctccggggtgccctga

SEQ ID NO: 1584 - RNA, 20 nt, synthetic construct
  misc_feature 1..20: note = Synthetic
  source 1..20: mol_type = other RNA
cctaatattatggatctgga

SEQ ID NO: 1585 - RNA, 20 nt, synthetic construct
  misc_feature 1..20: note = Synthetic
  source 1..20: mol_type = other RNA
cggcggcagcgataccagat

SEQ ID NO: 1586 - RNA, 20 nt, synthetic construct
  misc_feature 1..20: note = Synthetic
  source 1..20: mol_type = other RNA
gacccaaatcccgttgacag

SEQ ID NO: 1587 - RNA, 20 nt, synthetic construct
  misc_feature 1..20: note = Synthetic
  source 1..20: mol_type = other RNA
gatctggacttcgaggtcgg

SEQ ID NO: 1588 - RNA, 20 nt, synthetic construct
  misc_feature 1..20: note = Synthetic
  source 1..20: mol_type = other RNA
tgggtgctaaacagcacacg

SEQ ID NO: 1589 - RNA, 20 nt, synthetic construct
  misc_feature 1..20: note = Synthetic
  source 1..20: mol_type = other RNA
cgatagctgcacgcgtggcg

SEQ ID NO: 1590 - RNA, 20 nt, synthetic construct
  misc_feature 1..20: note = Synthetic
  source 1..20: mol_type = other RNA
gcgatagctgcacgcgtggc

SEQ ID NO: 1591 - RNA, 20 nt, synthetic construct
  misc_feature 1..20: note = Synthetic
  source 1..20: mol_type = other RNA
agcggcgatagctgcacgcg

SEQ ID NO: 1592 - RNA, 20 nt, synthetic construct
  misc_feature 1..20: note = Synthetic
  source 1..20: mol_type = other RNA
gcggtttatccggatagata

SEQ ID NO: 1593 - RNA, 20 nt, synthetic construct
  misc_feature 1..20: note = Synthetic
  source 1..20: mol_type = other RNA
cttgacaaaggtgtgagtcg

SEQ ID NO: 1594 - RNA, 20 nt, synthetic construct
  misc_feature 1..20: note = Synthetic
  source 1..20: mol_type = other RNA
gccccggcacccgctgtcaa

SEQ ID NO: 1595 - RNA, 20 nt, synthetic construct
  misc_feature 1..20: note = Synthetic
  source 1..20: mol_type = other RNA
acaccgagaattcgcccctg

SEQ ID NO: 1596 - RNA, 20 nt, synthetic construct
  misc_feature 1..20: note = Synthetic
  source 1..20: mol_type = other RNA
ggcgatagctgcacgcgtgg

SEQ ID NO: 1597 - RNA, 20 nt, synthetic construct
  misc_feature 1..20: note = Synthetic
  source 1..20: mol_type = other RNA
ttttctgatcggcatacagg

SEQ ID NO: 1598 - RNA, 20 nt, synthetic construct
  misc_feature 1..20: note = Synthetic
  source 1..20: mol_type = other RNA
atctatccggataaaccgcc

SEQ ID NO: 1599 - RNA, 20 nt, synthetic construct
  misc_feature 1..20: note = Synthetic
  source 1..20: mol_type = other RNA
ctttgtcaaggcgctgacca

SEQ ID NO: 1600 - RNA, 20 nt, synthetic construct
  misc_feature 1..20: note = Synthetic
  source 1..20: mol_type = other RNA
gtgtgacagtgtcagcgtgt

SEQ ID NO: 1601 - RNA, 20 nt, synthetic construct
  misc_feature 1..20: note = Synthetic
  source 1..20: mol_type = other RNA
taaacagcacacggggtgaa

SEQ ID NO: 1602 - RNA, 20 nt, synthetic construct
  misc_feature 1..20: note = Synthetic
  source 1..20: mol_type = other RNA
gcagacccgcaacattactg

SEQ ID NO: 1603 - RNA, 20 nt, synthetic construct
  misc_feature 1..20: note = Synthetic
  source 1..20: mol_type = other RNA
acacacaggccgtatctatc

SEQ ID NO: 1604 - RNA, 20 nt, synthetic construct
  misc_feature 1..20: note = Synthetic
  source 1..20: mol_type = other RNA
catggtcagcgccttgacaa

SEQ ID NO: 1605 - RNA, 20 nt, synthetic construct
  misc_feature 1..20: note = Synthetic
  source 1..20: mol_type = other RNA
cccgttgacagcgggtgccg

SEQ ID NO: 1606 - RNA, 20 nt, synthetic construct
  misc_feature 1..20: note = Synthetic
  source 1..20: mol_type = other RNA
gcaacattactgtggacccc

SEQ ID NO: 1607 - RNA, 20 nt, synthetic construct
  misc_feature 1..20: note = Synthetic
  source 1..20: mol_type = other RNA
atgctgaagtttagtccagt

SEQ ID NO: 1608 - RNA, 20 nt, synthetic construct
  misc_feature 1..20: note = Synthetic
  source 1..20: mol_type = other RNA
tgtcaacgggatttgggtcc

SEQ ID NO: 1609 - RNA, 20 nt, synthetic construct
  misc_feature 1..20: note = Synthetic
  source 1..20: mol_type = other RNA
gccgctttttaaacagcctg

SEQ ID NO: 1610 - RNA, 20 nt, synthetic construct
  misc_feature 1..20: note = Synthetic
  source 1..20: mol_type = other RNA
agcttttctgatcggcatac

SEQ ID NO: 1611 - RNA, 20 nt, synthetic construct
  misc_feature 1..20: note = Synthetic
  source 1..20: mol_type = other RNA
acccaaatcccgttgacagc

SEQ ID NO: 1612 - RNA, 20 nt, synthetic construct
  misc_feature 1..20: note = Synthetic
  source 1..20: mol_type = other RNA
gggatttgggtcccggcact

SEQ ID NO: 1613 - RNA, 20 nt, synthetic construct
  misc_feature 1..20: note = Synthetic
  source 1..20: mol_type = other RNA
caggatctggacttcgaggt

SEQ ID NO: 1614 - RNA, 20 nt, synthetic construct
  misc_feature 1..20: note = Synthetic
  source 1..20: mol_type = other RNA
gtgcagctatcgccgctgcc

SEQ ID NO: 1615 - RNA, 20 nt, synthetic construct
  misc_feature 1..20: note = Synthetic
  source 1..20: mol_type = other RNA
ggggcattgactcaaagcac

SEQ ID NO: 1616 - RNA, 20 nt, synthetic construct
  misc_feature 1..20: note = Synthetic
  source 1..20: mol_type = other RNA
acccgctgtcaacgggattt

SEQ ID NO: 1617 - RNA, 20 nt, synthetic construct
  misc_feature 1..20: note = Synthetic
  source 1..20: mol_type = other RNA
aattcgcccctgtggaagat

SEQ ID NO: 1618 - RNA, 20 nt, synthetic construct
  misc_feature 1..20: note = Synthetic
  source 1..20: mol_type = other RNA
tcgccgctttttaaacagcc

SEQ ID NO: 1619 - RNA, 20 nt, synthetic construct
  misc_feature 1..20: note = Synthetic
  source 1..20: mol_type = other RNA
tcccgttgacagcgggtgcc

SEQ ID NO: 1620 - RNA, 20 nt, synthetic construct
  misc_feature 1..20: note = Synthetic
  source 1..20: mol_type = other RNA
ccccggcacccgctgtcaac

SEQ ID NO: 1621 - RNA, 20 nt, synthetic construct
  misc_feature 1..20: note = Synthetic
  source 1..20: mol_type = other RNA
gtggtgctgcccccttcaac

SEQ ID NO: 1622 - RNA, 20 nt, synthetic construct
  misc_feature 1..20: note = Synthetic
  source 1..20: mol_type = other RNA
atcccgttgacagcgggtgc

SEQ ID NO: 1623 - RNA, 20 nt, synthetic construct
  misc_feature 1..20: note = Synthetic
  source 1..20: mol_type = other RNA
cacccgctgtcaacgggatt

SEQ ID NO: 1624 - RNA, 20 nt, synthetic construct
  misc_feature 1..20: note = Synthetic
  source 1..20: mol_type = other RNA
cttccacaggggcgaattct

SEQ ID NO: 1625 - RNA, 20 nt, synthetic construct
  misc_feature 1..20: note = Synthetic
  source 1..20: mol_type = other RNA
aggctgcctggcggtttatc

SEQ ID NO: 1626 - RNA, 20 nt, synthetic construct
  misc_feature 1..20: note = Synthetic
  source 1..20: mol_type = other RNA
tgcagctatcgccgctgccg

SEQ ID NO: 1627 - RNA, 20 nt, synthetic construct
  misc_feature 1..20: note = Synthetic
  source 1..20: mol_type = other RNA
cgtgcagctatcgccgctgc

SEQ ID NO: 1628 - RNA, 20 nt, synthetic construct
  misc_feature 1..20: note = Synthetic
  source 1..20: mol_type = other RNA
cgccgctttttaaacagcct

SEQ ID NO: 1629 - RNA, 20 nt, synthetic construct
  misc_feature 1..20: note = Synthetic
  source 1..20: mol_type = other RNA
tgagacgactgggcgctgcg

SEQ ID NO: 1630 - RNA, 20 nt, synthetic construct
  misc_feature 1..20: note = Synthetic
  source 1..20: mol_type = other RNA
gagcatgtcggcgccgtgcg

SEQ ID NO: 1631 - RNA, 20 nt, synthetic construct
  misc_feature 1..20: note = Synthetic
  source 1..20: mol_type = other RNA
ttgcaagcagggcgcgaacg

SEQ ID NO: 1632 - RNA, 20 nt, synthetic construct
  misc_feature 1..20: note = Synthetic
  source 1..20: mol_type = other RNA
gtgtcctcgcacacggtgca

SEQ ID NO: 1633 - RNA, 20 nt, synthetic construct
  misc_feature 1..20: note = Synthetic
  source 1..20: mol_type = other RNA
caagcagaacaccgtgtgcg

SEQ ID NO: 1634 - RNA, 20 nt, synthetic construct
  misc_feature 1..20: note = Synthetic
  source 1..20: mol_type = other RNA
agacctcatagccagcacgg

SEQ ID NO: 1635 - RNA, 20 nt, synthetic construct
  misc_feature 1..20: note = Synthetic
  source 1..20: mol_type = other RNA
tcgctggatgcggcgcaggg

SEQ ID NO: 1636 - RNA, 20 nt, synthetic construct
  misc_feature 1..20: note = Synthetic
  source 1..20: mol_type = other RNA
agcttctcaacggctctgcg

SEQ ID NO: 1637 - RNA, 20 nt, synthetic construct
  misc_feature 1..20: note = Synthetic
  source 1..20: mol_type = other RNA
acggtctggttggctccaca

SEQ ID NO: 1638 - RNA, 20 nt, synthetic construct
  misc_feature 1..20: note = Synthetic
  source 1..20: mol_type = other RNA
aggcgtgacgttctccgacg

SEQ ID NO: 1639 - RNA, 20 nt, synthetic construct
  misc_feature 1..20: note = Synthetic
  source 1..20: mol_type = other RNA
caagccgtgcaccgagtgcg

SEQ ID NO: 1640 - RNA, 20 nt, synthetic construct
  misc_feature 1..20: note = Synthetic
  source 1..20: mol_type = other RNA
gcgtcgtcggcctccacgca

SEQ ID NO: 1641 - RNA, 20 nt, synthetic construct
  misc_feature 1..20: note = Synthetic
  source 1..20: mol_type = other RNA
catgtcggcgccgtgcgtgg

SEQ ID NO: 1642 - RNA, 20 nt, synthetic construct
  misc_feature 1..20: note = Synthetic
  source 1..20: mol_type = other RNA
cgaggcgtgccgcgtgtgcg

SEQ ID NO: 1643 - RNA, 20 nt, synthetic construct
  misc_feature 1..20: note = Synthetic
  source 1..20: mol_type = other RNA
cgacggcacgtattccgacg

SEQ ID NO: 1644 - RNA, 20 nt, synthetic construct
  misc_feature 1..20: note = Synthetic
  source 1..20: mol_type = other RNA
tcccagcccgtggtgacccg

SEQ ID NO: 1645 - RNA, 20 nt, synthetic construct
  misc_feature 1..20: note = Synthetic
  source 1..20: mol_type = other RNA
gacagggatgaggttgtcgg

SEQ ID NO: 1646 - RNA, 20 nt, synthetic construct
  misc_feature 1..20: note = Synthetic
  source 1..20: mol_type = other RNA
gcttctcaacggctctgcgg

SEQ ID NO: 1647 - RNA, 20 nt, synthetic construct
  misc_feature 1..20: note = Synthetic
  source 1..20: mol_type = other RNA
ccccggttgggctcacaccg

SEQ ID NO: 1648 - RNA, 20 nt, synthetic construct
  misc_feature 1..20: note = Synthetic
  source 1..20: mol_type = other RNA
ggcgcggcccgtccatggcg

SEQ ID NO: 1649 - RNA, 20 nt, synthetic construct
  misc_feature 1..20: note = Synthetic
  source 1..20: mol_type = other RNA
cagcaggcgcggcccgtcca

SEQ ID NO: 1650 - RNA, 20 nt, synthetic construct
  misc_feature 1..20: note = Synthetic
  source 1..20: mol_type = other RNA
gccaccggccgcgccatgga

SEQ ID NO: 1651 - RNA, 20 nt, synthetic construct
  misc_feature 1..20: note = Synthetic
  source 1..20: mol_type = other RNA
ctcggtcgcgctcaccacgt

SEQ ID NO: 1652 - RNA, 20 nt, synthetic construct
  misc_feature 1..20: note = Synthetic
  source 1..20: mol_type = other RNA
agccccacgcactcggtgca

SEQ ID NO: 1653 - RNA, 20 nt, synthetic construct
  misc_feature 1..20: note = Synthetic
  source 1..20: mol_type = other RNA
agccgtgcaccgagtgcgtg

SEQ ID NO: 1654 - RNA, 20 nt, synthetic construct
  misc_feature 1..20: note = Synthetic
  source 1..20: mol_type = other RNA
gccgtaggcgcagcggcaca

SEQ ID NO: 1655 - RNA, 20 nt, synthetic construct
  misc_feature 1..20: note = Synthetic
  source 1..20: mol_type = other RNA
ctgcgcctacggctactacc

SEQ ID NO: 1656 - RNA, 20 nt, synthetic construct
  misc_feature 1..20: note = Synthetic
  source 1..20: mol_type = other RNA
cgtcggaatacgtgccgtcg

SEQ ID NO: 1657 - RNA, 20 nt, synthetic construct
  misc_feature 1..20: note = Synthetic
  source 1..20: mol_type = other RNA
ctcgtcggaatacgtgccgt

SEQ ID NO: 1658 - RNA, 20 nt, synthetic construct
  misc_feature 1..20: note = Synthetic
  source 1..20: mol_type = other RNA
gcgctcggtgtcctcgcaca

SEQ ID NO: 1659 - RNA, 20 nt, synthetic construct
  misc_feature 1..20: note = Synthetic
  source 1..20: mol_type = other RNA
cgaggtcggctcgctggatg

SEQ ID NO: 1660 - RNA, 20 nt, synthetic construct
  misc_feature 1..20: note = Synthetic
  source 1..20: mol_type = other RNA
catccagcgagccgacctcg

SEQ ID NO: 1661 - RNA, 20 nt, synthetic construct
  misc_feature 1..20: note = Synthetic
  source 1..20: mol_type = other RNA
ggtgcacggcttgcacggct

SEQ ID NO: 1662 - RNA, 20 nt, synthetic construct
  misc_feature 1..20: note = Synthetic
  source 1..20: mol_type = other RNA
aagccgtgcaccgagtgcgt

SEQ ID NO: 1663 - RNA, 20 nt, synthetic construct
  misc_feature 1..20: note = Synthetic
  source 1..20: mol_type = other RNA
gtcggggcactcctcgcaca

SEQ ID NO: 1664 - RNA, 20 nt, synthetic construct
  misc_feature 1..20: note = Synthetic
  source 1..20: mol_type = other RNA
gtgtggaccgtgtaatccaa

SEQ ID NO: 1665 - RNA, 20 nt, synthetic construct
  misc_feature 1..20: note = Synthetic
  source 1..20: mol_type = other RNA
gcttgcaagcagggcgcgaa

SEQ ID NO: 1666 - RNA, 20 nt, synthetic construct
  misc_feature 1..20: note = Synthetic
  source 1..20: mol_type = other RNA
gggtggcccagcttgcaagc

SEQ ID NO: 1667 - RNA, 20 nt, synthetic construct
  misc_feature 1..20: note = Synthetic
  source 1..20: mol_type = other RNA
gggctcacacacggtctggt

SEQ ID NO: 1668 - RNA, 20 nt, synthetic construct
  misc_feature 1..20: note = Synthetic
  source 1..20: mol_type = other RNA
ggtagtagccgtaggcgcag

SEQ ID NO: 1669 - RNA, 20 nt, synthetic construct
  misc_feature 1..20: note = Synthetic
  source 1..20: mol_type = other RNA
gtgtgcgaggagtgccccga

SEQ ID NO: 1670 - RNA, 20 nt, synthetic construct
  misc_feature 1..20: note = Synthetic
  source 1..20: mol_type = other RNA
accgtgtaatccaacggcca

SEQ ID NO: 1671 - RNA, 20 nt, synthetic construct
  misc_feature 1..20: note = Synthetic
  source 1..20: mol_type = other RNA
gcagccctcaagggtgacgg

SEQ ID NO: 1672 - RNA, 20 nt, synthetic construct
  misc_feature 1..20: note = Synthetic
  source 1..20: mol_type = other RNA
ggtggcccagcttgcaagca

SEQ ID NO: 1673 - RNA, 20 nt, synthetic construct
  misc_feature 1..20: note = Synthetic
  source 1..20: mol_type = other RNA
ggctcgctggatgcggcgca

SEQ ID NO: 1674 - RNA, 20 nt, synthetic construct
  misc_feature 1..20: note = Synthetic
  source 1..20: mol_type = other RNA
tctccacgaggtcggctcgc

SEQ ID NO: 1675 - RNA, 20 nt, synthetic construct
  misc_feature 1..20: note = Synthetic
  source 1..20: mol_type = other RNA
ccgagcccgcctcgcacacg

SEQ ID NO: 1676 - RNA, 20 nt, synthetic construct
  misc_feature 1..20: note = Synthetic
  source 1..20: mol_type = other RNA
ggcgtgccgcgtgtgcgagg

SEQ ID NO: 1677 - RNA, 20 nt, synthetic construct
  misc_feature 1..20: note = Synthetic
  source 1..20: mol_type = other RNA
atcacggcggaaacggtacg

SEQ ID NO: 1678 - RNA, 20 nt, synthetic construct
  misc_feature 1..20: note = Synthetic
  source 1..20: mol_type = other RNA
tggcgaacagaacatcacgg

SEQ ID NO: 1679 - RNA, 20 nt, synthetic construct
  misc_feature 1..20: note = Synthetic
  source 1..20: mol_type = other RNA
tcatcggccatcgacattcg

SEQ ID NO: 1680 - RNA, 20 nt, synthetic construct
  misc_feature 1..20: note = Synthetic
  source 1..20: mol_type = other RNA
agagacgctacaactcaccg

SEQ ID NO: 1681 - RNA, 20 nt, synthetic construct
  misc_feature 1..20: note = Synthetic
  source 1..20: mol_type = other RNA
gcggagcataagagtcaccg

SEQ ID NO: 1682 - RNA, 20 nt, synthetic construct
  misc_feature 1..20: note = Synthetic
  source 1..20: mol_type = other RNA
gagacgctacaactcaccgc

SEQ ID NO: 1683 - RNA, 20 nt, synthetic construct
  misc_feature 1..20: note = Synthetic
  source 1..20: mol_type = other RNA
cacataccgagtactcccct

SEQ ID NO: 1684 - RNA, 20 nt, synthetic construct
  misc_feature 1..20: note = Synthetic
  source 1..20: mol_type = other RNA
ggagcataagagtcaccgag

SEQ ID NO: 1685 - RNA, 20 nt, synthetic construct
  misc_feature 1..20: note = Synthetic
  source 1..20: mol_type = other RNA
cggagcataagagtcaccga

SEQ ID NO: 1686 - RNA, 20 nt, synthetic construct
  misc_feature 1..20: note = Synthetic
  source 1..20: mol_type = other RNA
tgaagtcagtgctcggacgt

SEQ ID NO: 1687 - RNA, 20 nt, synthetic construct
  misc_feature 1..20: note = Synthetic
  source 1..20: mol_type = other RNA
tcggtgtccattgcaatcac

SEQ ID NO: 1688 - RNA, 20 nt, synthetic construct
  misc_feature 1..20: note = Synthetic
  source 1..20: mol_type = other RNA
cccgcccttgtatctcatgg

SEQ ID NO: 1689 - RNA, 20 nt, synthetic construct
  misc_feature 1..20: note = Synthetic
  source 1..20: mol_type = other RNA
atgttctgttcgccaccacg

SEQ ID NO: 1690 - RNA, 20 nt, synthetic construct
  misc_feature 1..20: note = Synthetic
  source 1..20: mol_type = other RNA
ggattacgtgggcagccccg

SEQ ID NO: 1691 - RNA, 20 nt, synthetic construct
  misc_feature 1..20: note = Synthetic
  source 1..20: mol_type = other RNA
gaagccaggccggtcaaaaa

SEQ ID NO: 1692 - RNA, 20 nt, synthetic construct
  misc_feature 1..20: note = Synthetic
  source 1..20: mol_type = other RNA
gccggtcaaaaacggttgca

SEQ ID NO: 1693 - RNA, 20 nt, synthetic construct
  misc_feature 1..20: note = Synthetic
  source 1..20: mol_type = other RNA
acaataaactcgtgggctgg

SEQ ID NO: 1694 - RNA, 20 nt, synthetic construct
  misc_feature 1..20: note = Synthetic
  source 1..20: mol_type = other RNA
gtatctcatggaggattacg

SEQ ID NO: 1695 - RNA, 20 nt, synthetic construct
  misc_feature 1..20: note = Synthetic
  source 1..20: mol_type = other RNA
atatttctcgcttatctccg

SEQ ID NO: 1696 - RNA, 20 nt, synthetic construct
  misc_feature 1..20: note = Synthetic
  source 1..20: mol_type = other RNA
gtaatcctccatgagataca

SEQ ID NO: 1697 - RNA, 20 nt, synthetic construct
  misc_feature 1..20: note = Synthetic
  source 1..20: mol_type = other RNA
ttacgtgggcagccccgtgg

SEQ ID NO: 1698 - RNA, 20 nt, synthetic construct
  misc_feature 1..20: note = Synthetic
  source 1..20: mol_type = other RNA
gtgggtgaccgacaagtcat

SEQ ID NO: 1699 - RNA, 20 nt, synthetic construct
  misc_feature 1..20: note = Synthetic
  source 1..20: mol_type = other RNA
ctggtgtccccgaatgtcga

SEQ ID NO: 1700 - RNA, 20 nt, synthetic construct
  misc_feature 1..20: note = Synthetic
  source 1..20: mol_type = other RNA
catcgacattcggggacacc

SEQ ID NO: 1701 - RNA, 20 nt, synthetic construct
  misc_feature 1..20: note = Synthetic
  source 1..20: mol_type = other RNA
tttttatgaaacgcgatgta

SEQ ID NO: 1702 - RNA, 20 nt, synthetic construct
  misc_feature 1..20: note = Synthetic
  source 1..20: mol_type = other RNA
gcaaccgtttttgaccggcc

SEQ ID NO: 1703 - RNA, 20 nt, synthetic construct
  misc_feature 1..20: note = Synthetic
  source 1..20: mol_type = other RNA
ggggtattgatgataaacac

SEQ ID NO: 1704 - RNA, 20 nt, synthetic construct
  misc_feature 1..20: note = Synthetic
  source 1..20: mol_type = other RNA
cagtgctcggacgtaggttt

SEQ ID NO: 1705 - RNA, 20 nt, synthetic construct
  misc_feature 1..20: note = Synthetic
  source 1..20: mol_type = other RNA
tcagtgctcggacgtaggtt

SEQ ID NO: 1706 - RNA, 20 nt, synthetic construct
  misc_feature 1..20: note = Synthetic
  source 1..20: mol_type = other RNA
tctcgacaaggcacacacac

SEQ ID NO: 1707 - RNA, 20 nt, synthetic construct
  misc_feature 1..20: note = Synthetic
  source 1..20: mol_type = other RNA
attccagccggtgattgcaa

SEQ ID NO: 1708 - RNA, 20 nt, synthetic construct
  misc_feature 1..20: note = Synthetic
  source 1..20: mol_type = other RNA
gcccccgcccttgtatctca

SEQ ID NO: 1709 - RNA, 20 nt, synthetic construct
  misc_feature 1..20: note = Synthetic
  source 1..20: mol_type = other RNA
ctccatgagatacaagggcg

SEQ ID NO: 1710 - RNA, 20 nt, synthetic construct
  misc_feature 1..20: note = Synthetic
  source 1..20: mol_type = other RNA
gagtcaccgaggggagtact

SEQ ID NO: 1711 - RNA, 20 nt, synthetic construct
  misc_feature 1..20: note = Synthetic
  source 1..20: mol_type = other RNA
gtcgatggccgatgacttgt

SEQ ID NO: 1712 - RNA, 20 nt, synthetic construct
  misc_feature 1..20: note = Synthetic
  source 1..20: mol_type = other RNA
ccggtcaaaaacggttgcag

SEQ ID NO: 1713 - RNA, 20 nt, synthetic construct
  misc_feature 1..20: note = Synthetic
  source 1..20: mol_type = other RNA
tcagagaacaataaactcgt

SEQ ID NO: 1714 - RNA, 20 nt, synthetic construct
  misc_feature 1..20: note = Synthetic
  source 1..20: mol_type = other RNA
tgatgttctgttcgccacca

SEQ ID NO: 1715 - RNA, 20 nt, synthetic construct
  misc_feature 1..20: note = Synthetic
  source 1..20: mol_type = other RNA
cccctgcaaccgtttttgac

SEQ ID NO: 1716 - RNA, 20 nt, synthetic construct
  misc_feature 1..20: note = Synthetic
  source 1..20: mol_type = other RNA
tccatgagatacaagggcgg

SEQ ID NO: 1717 - RNA, 20 nt, synthetic construct
  misc_feature 1..20: note = Synthetic
  source 1..20: mol_type = other RNA
agtcatcggccatcgacatt

SEQ ID NO: 1718 - RNA, 20 nt, synthetic construct
  misc_feature 1..20: note = Synthetic
  source 1..20: mol_type = other RNA
ggccggtcaaaaacggttgc

SEQ ID NO: 1719 - RNA, 20 nt, synthetic construct
  misc_feature 1..20: note = Synthetic
  source 1..20: mol_type = other RNA
gcttatctccgtggcatcca

SEQ ID NO: 1720 - RNA, 20 nt, synthetic construct
  misc_feature 1..20: note = Synthetic
  source 1..20: mol_type = other RNA
tgtccattgcaatcaccggc

SEQ ID NO: 1721 - RNA, 20 nt, synthetic construct
  misc_feature 1..20: note = Synthetic
  source 1..20: mol_type = other RNA
ggacaccaggtcacggtgct

SEQ ID NO: 1722 - RNA, 20 nt, synthetic construct
  misc_feature 1..20: note = Synthetic
  source 1..20: mol_type = other RNA
tcttccgatttttctcgaca

SEQ ID NO: 1723 - RNA, 20 nt, synthetic construct
  misc_feature 1..20: note = Synthetic
  source 1..20: mol_type = other RNA
taccgtggcaaaagtaacca

SEQ ID NO: 1724 - RNA, 20 nt, synthetic construct
  misc_feature 1..20: note = Synthetic
  source 1..20: mol_type = other RNA
acagaacatcacggcggaaa

SEQ ID NO: 1725 - RNA, 20 nt, synthetic construct
  misc_feature 1..20: note = Synthetic
  source 1..20: mol_type = other RNA
gcgcccacgcaagtccacag

SEQ ID NO: 1726 - RNA, 20 nt, synthetic construct
  misc_feature 1..20: note = Synthetic
  source 1..20: mol_type = other RNA
cggaccgctgtggacttgcg

SEQ ID NO: 1727 - RNA, 20 nt, synthetic construct
  misc_feature 1..20: note = Synthetic
  source 1..20: mol_type = other RNA
cttctttgaaacccgctgca

SEQ ID NO: 1728 - RNA, 20 nt, synthetic construct
  misc_feature 1..20: note = Synthetic
  source 1..20: mol_type = other RNA
cctagacaggactactcggg

SEQ ID NO: 1729 - RNA, 20 nt, synthetic construct
  misc_feature 1..20: note = Synthetic
  source 1..20: mol_type = other RNA
tgtggacttgcgtgggcgcg

SEQ ID NO: 1730 - RNA, 20 nt, synthetic construct
  misc_feature 1..20: note = Synthetic
  source 1..20: mol_type = other RNA
ggaccgctgtggacttgcgt

SEQ ID NO: 1731 - RNA, 20 nt, synthetic construct
  misc_feature 1..20: note = Synthetic
  source 1..20: mol_type = other RNA
aaactgcaccagcgagtcgt

SEQ ID NO: 1732 - RNA, 20 nt, synthetic construct
  misc_feature 1..20: note = Synthetic
  source 1..20: mol_type = other RNA
cagtttcgctcaccccacgc

SEQ ID NO: 1733 - RNA, 20 nt, synthetic construct
  misc_feature 1..20: note = Synthetic
  source 1..20: mol_type = other RNA
ctgcaaggctgataacgctg

SEQ ID NO: 1734 - RNA, 20 nt, synthetic construct
  misc_feature 1..20: note = Synthetic
  source 1..20: mol_type = other RNA
cacgcaagtccacagcggtc

SEQ ID NO: 1735 - RNA, 20 nt, synthetic construct
  misc_feature 1..20: note = Synthetic
  source 1..20: mol_type = other RNA
tgggactcaattggcacact

SEQ ID NO: 1736 - RNA, 20 nt, synthetic construct
  misc_feature 1..20: note = Synthetic
  source 1..20: mol_type = other RNA
actgcaccagcgagtcgtcg

SEQ ID NO: 1737 - RNA, 20 nt, synthetic construct
  misc_feature 1..20: note = Synthetic
  source 1..20: mol_type = other RNA
ttgggactcaattggcacac

SEQ ID NO: 1738 - RNA, 20 nt, synthetic construct
  misc_feature 1..20: note = Synthetic
  source 1..20: mol_type = other RNA
agctcaccccgacgactcgc

SEQ ID NO: 1739 - RNA, 20 nt, synthetic construct
  misc_feature 1..20: note = Synthetic
  source 1..20: mol_type = other RNA
tttcaaagaagtactggcgg

SEQ ID NO: 1740 - RNA, 20 nt, synthetic construct
  misc_feature 1..20: note = Synthetic
  source 1..20: mol_type = other RNA
tcaaagaagtactggcggag

SEQ ID NO: 1741 - RNA, 20 nt, synthetic construct
  misc_feature 1..20: note = Synthetic
  source 1..20: mol_type = other RNA
cggccaaccgcagccggcgt

SEQ ID NO: 1742 - RNA, 20 nt, synthetic construct
  misc_feature 1..20: note = Synthetic
  source 1..20: mol_type = other RNA
gtgccccggccaaccgcagc

SEQ ID NO: 1743 - RNA, 20 nt, synthetic construct
  misc_feature 1..20: note = Synthetic
  source 1..20: mol_type = other RNA
agcgttatcagccttgcagc

SEQ ID NO: 1744 - RNA, 20 nt, synthetic construct
  misc_feature 1..20: note = Synthetic
  source 1..20: mol_type = other RNA
agcgggtttcaaagaagtac

SEQ ID NO: 1745 - RNA, 20 nt, synthetic construct
  misc_feature 1..20: note = Synthetic
  source 1..20: mol_type = other RNA
agcgagtcgtcggggtgagc

SEQ ID NO: 1746 - RNA, 20 nt, synthetic construct
  misc_feature 1..20: note = Synthetic
  source 1..20: mol_type = other RNA
aactgcaccagcgagtcgtc

SEQ ID NO: 1747 - RNA, 20 nt, synthetic construct
  misc_feature 1..20: note = Synthetic
  source 1..20: mol_type = other RNA
tggctagccaggtcgctgcg

SEQ ID NO: 1748 - RNA, 20 nt, synthetic construct
  misc_feature 1..20: note = Synthetic
  source 1..20: mol_type = other RNA
ccgtccgcctcgcagcatcg

SEQ ID NO: 1749 - RNA, 20 nt, synthetic construct
  misc_feature 1..20: note = Synthetic
  source 1..20: mol_type = other RNA
ctttgagtatatgcggcacg

SEQ ID NO: 1750 - RNA, 20 nt, synthetic construct
  misc_feature 1..20: note = Synthetic
  source 1..20: mol_type = other RNA
gcaatcgactgcatcacgca

SEQ ID NO: 1751 - RNA, 20 nt, synthetic construct
  misc_feature 1..20: note = Synthetic
  source 1..20: mol_type = other RNA
ggcgccgccgcgatgctgcg

SEQ ID NO: 1752 - RNA, 20 nt, synthetic construct
  misc_feature 1..20: note = Synthetic
  source 1..20: mol_type = other RNA
acggagaccactcttcacga

SEQ ID NO: 1753 - RNA, 20 nt, synthetic construct
  misc_feature 1..20: note = Synthetic
  source 1..20: mol_type = other RNA
cggcagccaatgagaccgtg

SEQ ID NO: 1754 - RNA, 20 nt, synthetic construct
  misc_feature 1..20: note = Synthetic
  source 1..20: mol_type = other RNA
gcccactagacagttgcgtg

SEQ ID NO: 1755 - RNA, 20 nt, synthetic construct
  misc_feature 1..20: note = Synthetic
  source 1..20: mol_type = other RNA
gtaccagctctccaacacgg

SEQ ID NO: 1756 - RNA, 20 nt, synthetic construct
  misc_feature 1..20: note = Synthetic
  source 1..20: mol_type = other RNA
caggaagaacgtgacgtgct

SEQ ID NO: 1757 - RNA, 20 nt, synthetic construct
  misc_feature 1..20: note = Synthetic
  source 1..20: mol_type = other RNA
tgatggcgtagacctctggt

SEQ ID NO: 1758 - RNA, 20 nt, synthetic construct
  misc_feature 1..20: note = Synthetic
  source 1..20: mol_type = other RNA
gagagactccagagcgttga

SEQ ID NO: 1759 - RNA, 20 nt, synthetic construct
  misc_feature 1..20: note = Synthetic
  source 1..20: mol_type = other RNA
ccctttcgagttcaaccccg

SEQ ID NO: 1760 - RNA, 20 nt, synthetic construct
  misc_feature 1..20: note = Synthetic
  source 1..20: mol_type = other RNA
cttcttcggcgtctgcaccg

SEQ ID NO: 1761 - RNA, 20 nt, synthetic construct
  misc_feature 1..20: note = Synthetic
  source 1..20: mol_type = other RNA
tcaccaccgagagcgacgtg

SEQ ID NO: 1762 - RNA, 20 nt, synthetic construct
  misc_feature 1..20: note = Synthetic
  source 1..20: mol_type = other RNA
ggcaatcgactgcatcacgc

SEQ ID NO: 1763 - RNA, 20 nt, synthetic construct
  misc_feature 1..20: note = Synthetic
  source 1..20: mol_type = other RNA
tctagcagcccgcaactgca

SEQ ID NO: 1764 - RNA, 20 nt, synthetic construct
  misc_feature 1..20: note = Synthetic
  source 1..20: mol_type = other RNA
gccgccgcgatgctgcgagg

SEQ ID NO: 1765 - RNA, 20 nt, synthetic construct
  misc_feature 1..20: note = Synthetic
  source 1..20: mol_type = other RNA
gaagagtggtctccgtttcg

SEQ ID NO: 1766 - RNA, 20 nt, synthetic construct
  misc_feature 1..20: note = Synthetic
  source 1..20: mol_type = other RNA
ccaggtgcccaatgcctcgg

SEQ ID NO: 1767 - RNA, 20 nt, synthetic construct
  misc_feature 1..20: note = Synthetic
  source 1..20: mol_type = other RNA
gcgcagacacccgtgccgca

SEQ ID NO: 1768 - RNA, 20 nt, synthetic construct
  misc_feature 1..20: note = Synthetic
  source 1..20: mol_type = other RNA
gttgccgttgttgacgtggg

SEQ ID NO: 1769 - RNA, 20 nt, synthetic construct
  misc_feature 1..20: note = Synthetic
  source 1..20: mol_type = other RNA
ccgggacatcgtgctcaagt

SEQ ID NO: 1770 - RNA, 20 nt, synthetic construct
  misc_feature 1..20: note = Synthetic
  source 1..20: mol_type = other RNA
tcggcaggacttccagcgtg

SEQ ID NO: 1771 - RNA, 20 nt, synthetic construct
  misc_feature 1..20: note = Synthetic
  source 1..20: mol_type = other RNA
cggtacaggatgctctcggg

SEQ ID NO: 1772 - RNA, 20 nt, synthetic construct
  misc_feature 1..20: note = Synthetic
  source 1..20: mol_type = other RNA
atgatggcgtagacctctgg

SEQ ID NO: 1773 - RNA, 20 nt, synthetic construct
  misc_feature 1..20: note = Synthetic
  source 1..20: mol_type = other RNA
aggtcttctcaccatcaccg

SEQ ID NO: 1774 - RNA, 20 nt, synthetic construct
  misc_feature 1..20: note = Synthetic
  source 1..20: mol_type = other RNA
ttacggtacaggatgctctc

SEQ ID NO: 1775 - RNA, 20 nt, synthetic construct
  misc_feature 1..20: note = Synthetic
  source 1..20: mol_type = other RNA
gctccacacgtcgctctcgg

SEQ ID NO: 1776 - RNA, 20 nt, synthetic construct
  misc_feature 1..20: note = Synthetic
  source 1..20: mol_type = other RNA
gtaccagggctgcttgccgt

SEQ ID NO: 1777 - RNA, 20 nt, synthetic construct
  misc_feature 1..20: note = Synthetic
  source 1..20: mol_type = other RNA
cagaggtctacgccatcatg

SEQ ID NO: 1778 - RNA, 20 nt, synthetic construct
  misc_feature 1..20: note = Synthetic
  source 1..20: mol_type = other RNA
cgcagtcccgaggagccgtg

SEQ ID NO: 1779 - RNA, 20 nt, synthetic construct
  misc_feature 1..20: note = Synthetic
  source 1..20: mol_type = other RNA
tcgcagtcccgaggagccgt

SEQ ID NO: 1780 - RNA, 20 nt, synthetic construct
  misc_feature 1..20: note = Synthetic
  source 1..20: mol_type = other RNA
cctcgggactgcgatgcacc

SEQ ID NO: 1781 - RNA, 20 nt, synthetic construct
  misc_feature 1..20: note = Synthetic
  source 1..20: mol_type = other RNA
cccagcaccatcgtgaagag

SEQ ID NO: 1782 - RNA, 20 nt, synthetic construct
  misc_feature 1..20: note = Synthetic
  source 1..20: mol_type = other RNA
actcacaggcgactgagccg

SEQ ID NO: 1783 - RNA, 20 nt, synthetic construct
  misc_feature 1..20: note = Synthetic
  source 1..20: mol_type = other RNA
gggcacctggaccttcagcg

SEQ ID NO: 1784 - RNA, 20 nt, synthetic construct
  misc_feature 1..20: note = Synthetic
  source 1..20: mol_type = other RNA
gtcgtcccccacatccaccg

SEQ ID NO: 1785 - RNA, 20 nt, synthetic construct
  misc_feature 1..20: note = Synthetic
  source 1..20: mol_type = other RNA
gaagctggtctcattgagca

SEQ ID NO: 1786 - RNA, 20 nt, synthetic construct
  misc_feature 1..20: note = Synthetic
  source 1..20: mol_type = other RNA
caacggcaactacacgctgc

SEQ ID NO: 1787 - RNA, 20 nt, synthetic construct
  misc_feature 1..20: note = Synthetic
  source 1..20: mol_type = other RNA
gcagtctccttctcgccggt

SEQ ID NO: 1788 - RNA, 20 nt, synthetic construct
  misc_feature 1..20: note = Synthetic
  source 1..20: mol_type = other RNA
cggtggtgaacttacggtac

SEQ ID NO: 1789 - RNA, 20 nt, synthetic construct
  misc_feature 1..20: note = Synthetic
  source 1..20: mol_type = other RNA
agttgcgggctgctagatct

SEQ ID NO: 1790 - RNA, 20 nt, synthetic construct
  misc_feature 1..20: note = Synthetic
  source 1..20: mol_type = other RNA
gactgcgatgcacccgggat

SEQ ID NO: 1791 - RNA, 20 nt, synthetic construct
  misc_feature 1..20: note = Synthetic
  source 1..20: mol_type = other RNA
cggacactcacagctcagtc

SEQ ID NO: 1792 - RNA, 20 nt, synthetic construct
  misc_feature 1..20: note = Synthetic
  source 1..20: mol_type = other RNA
atctggagctccgtgatctg

SEQ ID NO: 1793 - RNA, 20 nt, synthetic construct
  misc_feature 1..20: note = Synthetic
  source 1..20: mol_type = other RNA
aggcatctggcgccacgaaa

SEQ ID NO: 1794 - RNA, 20 nt, synthetic construct
  misc_feature 1..20: note = Synthetic
  source 1..20: mol_type = other RNA
ggcacctggaccttcagcgt

SEQ ID NO: 1795 - RNA, 20 nt, synthetic construct
  misc_feature 1..20: note = Synthetic
  source 1..20: mol_type = other RNA
gtcgctgcaccagatccgag

SEQ ID NO: 1796 - RNA, 20 nt, synthetic construct
  misc_feature 1..20: note = Synthetic
  source 1..20: mol_type = other RNA
attacgtacaatgcacagtg

SEQ ID NO: 1797 - RNA, 20 nt, synthetic construct
  misc_feature 1..20: note = Synthetic
  source 1..20: mol_type = other RNA
gcttcagtggttctataacg

SEQ ID NO: 1798 - RNA, 20 nt, synthetic construct
  misc_feature 1..20: note = Synthetic
  source 1..20: mol_type = other RNA
atcatcattgctgataacgg

SEQ ID NO: 1799 - RNA, 20 nt, synthetic construct
  misc_feature 1..20: note = Synthetic
  source 1..20: mol_type = other RNA
acgcaaggacttccaccgtg

SEQ ID NO: 1800 - RNA, 20 nt, synthetic construct
  misc_feature 1..20: note = Synthetic
  source 1..20: mol_type = other RNA
accaatcacacggagtacca

SEQ ID NO: 1801 - RNA, 20 nt, synthetic construct
  misc_feature 1..20: note = Synthetic
  source 1..20: mol_type = other RNA
gccccagagccgcgccatgg

SEQ ID NO: 1802 - RNA, 20 nt, synthetic construct
  misc_feature 1..20: note = Synthetic
  source 1..20: mol_type = other RNA
accactgaagcgctggtttg

SEQ ID NO: 1803 - RNA, 20 nt, synthetic construct
  misc_feature 1..20: note = Synthetic
  source 1..20: mol_type = other RNA
ggttttatcagtgacgtctg

SEQ ID NO: 1804 - RNA, 20 nt, synthetic construct
  misc_feature 1..20: note = Synthetic
  source 1..20: mol_type = other RNA
caagttctatggcgtctgcg

SEQ ID NO: 1805 - RNA, 20 nt, synthetic construct
  misc_feature 1..20: note = Synthetic
  source 1..20: mol_type = other RNA
atcgcggtgcacgaagtgct

SEQ ID NO: 1806 - RNA, 20 nt, synthetic construct
  misc_feature 1..20: note = Synthetic
  source 1..20: mol_type = other RNA
gtcagtgctgtacacgtccc

SEQ ID NO: 1807 - RNA, 20 nt, synthetic construct
  misc_feature 1..20: note = Synthetic
  source 1..20: mol_type = other RNA
cattgtgtggccaccgacct

SEQ ID NO: 1808 - RNA, 20 nt, synthetic construct
  misc_feature 1..20: note = Synthetic
  source 1..20: mol_type = other RNA
accccaaaccagcgcttcag

SEQ ID NO: 1809 - RNA, 20 nt, synthetic construct
  misc_feature 1..20: note = Synthetic
  source 1..20: mol_type = other RNA
gccgtggtactccgtgtgat

SEQ ID NO: 1810 - RNA, 20 nt, synthetic construct
  misc_feature 1..20: note = Synthetic
  source 1..20: mol_type = other RNA
aactgcagcgaatgacatcg

SEQ ID NO: 1811 - RNA, 20 nt, synthetic construct
  misc_feature 1..20: note = Synthetic
  source 1..20: mol_type = other RNA
caccgagagatgttcccgac

SEQ ID NO: 1812 - RNA, 20 nt, synthetic construct
  misc_feature 1..20: note = Synthetic
  source 1..20: mol_type = other RNA
acgtcactgataaaaccggt

SEQ ID NO: 1813 - RNA, 20 nt, synthetic construct
  misc_feature 1..20: note = Synthetic
  source 1..20: mol_type = other RNA
tgtggtggtgattgcgtctg

SEQ ID NO: 1814 - RNA, 20 nt, synthetic construct
  misc_feature 1..20: note = Synthetic
  source 1..20: mol_type = other RNA
gttctatggcgtctgcgtgg

SEQ ID NO: 1815 - RNA, 20 nt, synthetic construct
  misc_feature 1..20: note = Synthetic
  source 1..20: mol_type = other RNA
gactgcgtcagttccgtggg

SEQ ID NO: 1816 - RNA, 20 nt, synthetic construct
  misc_feature 1..20: note = Synthetic
  source 1..20: mol_type = other RNA
ctgcgactgcgtcagttccg

SEQ ID NO: 1817 - RNA, 20 nt, synthetic construct
  misc_feature 1..20: note = Synthetic
  source 1..20: mol_type = other RNA
ggctgagggcaacccgccca

SEQ ID NO: 1818 - RNA, 20 nt, synthetic construct
  misc_feature 1..20: note = Synthetic
  source 1..20: mol_type = other RNA
tatagcccagcagatcgccg

SEQ ID NO: 1819 - RNA, 20 nt, synthetic construct
  misc_feature 1..20: note = Synthetic
  source 1..20: mol_type = other RNA
catgtacaggaaattcacga

SEQ ID NO: 1820 - RNA, 20 nt, synthetic construct
  misc_feature 1..20: note = Synthetic
  source 1..20: mol_type = other RNA
gtaccagctgtcaaacaatg

SEQ ID NO: 1821 - RNA, 20 nt, synthetic construct
  misc_feature 1..20: note = Synthetic
  source 1..20: mol_type = other RNA
ggtgatagagtgtatcactc

SEQ ID NO: 1822 - RNA, 20 nt, synthetic construct
  misc_feature 1..20: note = Synthetic
  source 1..20: mol_type = other RNA
gcactgcatttgcaggacgt

SEQ ID NO: 1823 - RNA, 20 nt, synthetic construct
  misc_feature 1..20: note = Synthetic
  source 1..20: mol_type = other RNA
cgacccttctcctggcatcg

SEQ ID NO: 1824 - RNA, 20 nt, synthetic construct
  misc_feature 1..20: note = Synthetic
  source 1..20: mol_type = other RNA
cgtcactgataaaaccggtc

SEQ ID NO: 1825 - RNA, 20 nt, synthetic construct
  misc_feature 1..20: note = Synthetic
  source 1..20: mol_type = other RNA
cgccaggtagaccatgcccg

SEQ ID NO: 1826 - RNA, 20 nt, synthetic construct
  misc_feature 1..20: note = Synthetic
  source 1..20: mol_type = other RNA
gtacagcactgactactaca

SEQ ID NO: 1827 - RNA, 20 nt, synthetic construct
  misc_feature 1..20: note = Synthetic
  source 1..20: mol_type = other RNA
gcattgtgtggccaccgacc

SEQ ID NO: 1828 - RNA, 20 nt, synthetic construct
  misc_feature 1..20: note = Synthetic
  source 1..20: mol_type = other RNA
tcacgacggaaagcgacgtc

SEQ ID NO: 1829 - RNA, 20 nt, synthetic construct
  misc_feature 1..20: note = Synthetic
  source 1..20: mol_type = other RNA
aaggtggcatggacccgcca

SEQ ID NO: 1830 - RNA, 20 nt, synthetic construct
  misc_feature 1..20: note = Synthetic
  source 1..20: mol_type = other RNA
catgcccgcggcgatctgct

SEQ ID NO: 1831 - RNA, 20 nt, synthetic construct
  misc_feature 1..20: note = Synthetic
  source 1..20: mol_type = other RNA
agtcagtgctgtacacgtcc

SEQ ID NO: 1832 - RNA, 20 nt, synthetic construct
  misc_feature 1..20: note = Synthetic
  source 1..20: mol_type = other RNA
acctcctgggggcacgtgcg

SEQ ID NO: 1833 - RNA, 20 nt, synthetic construct
  misc_feature 1..20: note = Synthetic
  source 1..20: mol_type = other RNA
gcgaccccgcacgtgccccc

SEQ ID NO: 1834 - RNA, 20 nt, synthetic construct
  misc_feature 1..20: note = Synthetic
  source 1..20: mol_type = other RNA
ggcatggacccgccatggcg

SEQ ID NO: 1835 - RNA, 20 nt, synthetic construct
  misc_feature 1..20: note = Synthetic
  source 1..20: mol_type = other RNA
catcgtggcatttccgagat

SEQ ID NO: 1836 - RNA, 20 nt, synthetic construct
  misc_feature 1..20: note = Synthetic
  source 1..20: mol_type = other RNA
gtattgggatgttggtaacc

SEQ ID NO: 1837 - RNA, 20 nt, synthetic construct
  misc_feature 1..20: note = Synthetic
  source 1..20: mol_type = other RNA
gcgcttcagtggttctataa

SEQ ID NO: 1838 - RNA, 20 nt, synthetic construct
  misc_feature 1..20: note = Synthetic
  source 1..20: mol_type = other RNA
aaccggtcgggaacatctct

SEQ ID NO: 1839 - RNA, 20 nt, synthetic construct
  misc_feature 1..20: note = Synthetic
  source 1..20: mol_type = other RNA
actgcgtcagttccgtgggc

SEQ ID NO: 1840 - RNA, 20 nt, synthetic construct
  misc_feature 1..20: note = Synthetic
  source 1..20: mol_type = other RNA
tgcgactgcgtcagttccgt

SEQ ID NO: 1841 - RNA, 20 nt, synthetic construct
  misc_feature 1..20: note = Synthetic
  source 1..20: mol_type = other RNA
ccagcagatcgccgcgggca

SEQ ID NO: 1842 - RNA, 20 nt, synthetic construct
  misc_feature 1..20: note = Synthetic
  source 1..20: mol_type = other RNA
aatgcagtgcctctcggatc

SEQ ID NO: 1843 - RNA, 20 nt, synthetic construct
  misc_feature 1..20: note = Synthetic
  source 1..20: mol_type = other RNA
gcctgccaggaggctaacta

SEQ ID NO: 1844 - RNA, 20 nt, synthetic construct
  misc_feature 1..20: note = Synthetic
  source 1..20: mol_type = other RNA
ttccatccgcaggagctaca

SEQ ID NO: 1845 - RNA, 20 nt, synthetic construct
  misc_feature 1..20: note = Synthetic
  source 1..20: mol_type = other RNA
agtagcggccatgcactgcc

SEQ ID NO: 1846 - RNA, 20 nt, synthetic construct
  misc_feature 1..20: note = Synthetic
  source 1..20: mol_type = other RNA
ctggcagagcaagcgcactg

SEQ ID NO: 1847 - RNA, 20 nt, synthetic construct
  misc_feature 1..20: note = Synthetic
  source 1..20: mol_type = other RNA
gcgcactgagggcattgtgt

SEQ ID NO: 1848 - RNA, 20 nt, synthetic construct
  misc_feature 1..20: note = Synthetic
  source 1..20: mol_type = other RNA
accgtagttagcctcctggc

SEQ ID NO: 1849 - RNA, 20 nt, synthetic construct
  misc_feature 1..20: note = Synthetic
  source 1..20: mol_type = other RNA
tggcagagcaagcgcactga

SEQ ID NO: 1850 - RNA, 20 nt, synthetic construct
  misc_feature 1..20: note = Synthetic
  source 1..20: mol_type = other RNA
gggcaccgtagttagcctcc

SEQ ID NO: 1851 - RNA, 20 nt, synthetic construct
  misc_feature 1..20: note = Synthetic
  source 1..20: mol_type = other RNA
acaccacagcgtctccccga

SEQ ID NO: 1852 - RNA, 20 nt, synthetic construct
  misc_feature 1..20: note = Synthetic
  source 1..20: mol_type = other RNA
aggccgtcggggagacgctg

SEQ ID NO: 1853 - RNA, 20 nt, synthetic construct
  misc_feature 1..20: note = Synthetic
  source 1..20: mol_type = other RNA
gagacgctgtggtgtgactg

SEQ ID NO: 1854 - RNA, 20 nt, synthetic construct
  misc_feature 1..20: note = Synthetic
  source 1..20: mol_type = other RNA
cgactgcacctggcacatgg

SEQ ID NO: 1855 - RNA, 20 nt, synthetic construct
  misc_feature 1..20: note = Synthetic
  source 1..20: mol_type = other RNA
gtgatggggaccacgatgaa

SEQ ID NO: 1856 - RNA, 20 nt, synthetic construct
  misc_feature 1..20: note = Synthetic
  source 1..20: mol_type = other RNA
gcgccgcgggaggcggcaca

SEQ ID NO: 1857 - RNA, 20 nt, synthetic construct
  misc_feature 1..20: note = Synthetic
  source 1..20: mol_type = other RNA
agtggtcatgaagaggtgat

SEQ ID NO: 1858 - RNA, 20 nt, synthetic construct
  misc_feature 1..20: note = Synthetic
  source 1..20: mol_type = other RNA
aggttcttcctggcagtgca

SEQ ID NO: 1859 - RNA, 20 nt, synthetic construct
  misc_feature 1..20: note = Synthetic
  source 1..20: mol_type = other RNA
gggtagaggatgctgccggg

SEQ ID NO: 1860 - RNA, 20 nt, synthetic construct
  misc_feature 1..20: note = Synthetic
  source 1..20: mol_type = other RNA
gtcacccggtcataggaagg

SEQ ID NO: 1861 - RNA, 20 nt, synthetic construct
  misc_feature 1..20: note = Synthetic
  source 1..20: mol_type = other RNA
aaagagctgcatgccgacca

SEQ ID NO: 1862 - RNA, 20 nt, synthetic construct
  misc_feature 1..20: note = Synthetic
  source 1..20: mol_type = other RNA
cgtcattggatagtgctcca

SEQ ID NO: 1863 - RNA, 20 nt, synthetic construct
  misc_feature 1..20: note = Synthetic
  source 1..20: mol_type = other RNA
gtgtcgtcggggcacaaaca

SEQ ID NO: 1864 - RNA, 20 nt, synthetic construct
  misc_feature 1..20: note = Synthetic
  source 1..20: mol_type = other RNA
ctgagtcattagtcgaaaca

SEQ ID NO: 1865 - RNA, 20 nt, synthetic construct
  misc_feature 1..20: note = Synthetic
  source 1..20: mol_type = other RNA
ccgggtgacaaagccaattg

SEQ ID NO: 1866 - RNA, 20 nt, synthetic construct
  misc_feature 1..20: note = Synthetic
  source 1..20: mol_type = other RNA
cagctttagagggcgagcaa

SEQ ID NO: 1867 - RNA, 20 nt, synthetic construct
  misc_feature 1..20: note = Synthetic
  source 1..20: mol_type = other RNA
tttgtcacccggtcatagga

SEQ ID NO: 1868 - RNA, 20 nt, synthetic construct
  misc_feature 1..20: note = Synthetic
  source 1..20: mol_type = other RNA
gcgtgggagttgacaatcac

SEQ ID NO: 1869 - RNA, 20 nt, synthetic construct
  misc_feature 1..20: note = Synthetic
  source 1..20: mol_type = other RNA
tggcgagtccaagttctacc

SEQ ID NO: 1870 - RNA, 20 nt, synthetic construct
  misc_feature 1..20: note = Synthetic
  source 1..20: mol_type = other RNA
agaacttggactcgccaatg

SEQ ID NO: 1871 - RNA, 20 nt, synthetic construct
  misc_feature 1..20: note = Synthetic
  source 1..20: mol_type = other RNA
tggctttgtcacccggtcat

SEQ ID NO: 1872 - RNA, 20 nt, synthetic construct
  misc_feature 1..20: note = Synthetic
  source 1..20: mol_type = other RNA
ttaacaccacaactggtgac

SEQ ID NO: 1873 - RNA, 20 nt, synthetic construct
  misc_feature 1..20: note = Synthetic
  source 1..20: mol_type = other RNA
aaagacgattaagacgatgt

SEQ ID NO: 1874 - RNA, 20 nt, synthetic construct
  misc_feature 1..20: note = Synthetic
  source 1..20: mol_type = other RNA
ttgtgttccgcgtgctgtgt

SEQ ID NO: 1875 - RNA, 20 nt, synthetic construct
  misc_feature 1..20: note = Synthetic
  source 1..20: mol_type = other RNA
aactgaaggtccaccaacca

SEQ ID NO: 1876 - RNA, 20 nt, synthetic construct
  misc_feature 1..20: note = Synthetic
  source 1..20: mol_type = other RNA
tcccgatgcaactcagttca

SEQ ID NO: 1877 - RNA, 20 nt, synthetic construct
  misc_feature 1..20: note = Synthetic
  source 1..20: mol_type = other RNA
gggtggcttactgttgagaa

SEQ ID NO: 1878 - RNA, 20 nt, synthetic construct
  misc_feature 1..20: note = Synthetic
  source 1..20: mol_type = other RNA
ggtacagtcacagtaagact

SEQ ID NO: 1879 - RNA, 20 nt, synthetic construct
  misc_feature 1..20: note = Synthetic
  source 1..20: mol_type = other RNA
catggagcactatccaatga

SEQ ID NO: 1880 - RNA, 20 nt, synthetic construct
  misc_feature 1..20: note = Synthetic
  source 1..20: mol_type = other RNA
gaccctaataaagttaaccc

SEQ ID NO: 1881 - RNA, 20 nt, synthetic construct
  misc_feature 1..20: note = Synthetic
  source 1..20: mol_type = other RNA
gtcaaacctgtcaccagttg

SEQ ID NO: 1882 - RNA, 20 nt, synthetic construct
  misc_feature 1..20: note = Synthetic
  source 1..20: mol_type = other RNA
tgtagaagaacagcccgtag

SEQ ID NO: 1883 - RNA, 20 nt, synthetic construct
  misc_feature 1..20: note = Synthetic
  source 1..20: mol_type = other RNA
ttaagtgggtacataccact

SEQ ID NO: 1884 - RNA, 20 nt, synthetic construct
  misc_feature 1..20: note = Synthetic
  source 1..20: mol_type = other RNA
acgcttagcctggtagaact

SEQ ID NO: 1885 - RNA, 20 nt, synthetic construct
  misc_feature 1..20: note = Synthetic
  source 1..20: mol_type = other RNA
tcagttcctacatcgcctgt

SEQ ID NO: 1886 - RNA, 20 nt, synthetic construct
  misc_feature 1..20: note = Synthetic
  source 1..20: mol_type = other RNA
cagtaggtcatcccggatgc

SEQ ID NO: 1887 - RNA, 20 nt, synthetic construct
  misc_feature 1..20: note = Synthetic
  source 1..20: mol_type = other RNA
acggctctcgttatcctcaa

SEQ ID NO: 1888 - RNA, 20 nt, synthetic construct
  misc_feature 1..20: note = Synthetic
  source 1..20: mol_type = other RNA
cttgtttcgactaatgactc

SEQ ID NO: 1889 - RNA, 20 nt, synthetic construct
  misc_feature 1..20: note = Synthetic
  source 1..20: mol_type = other RNA
ctgaaatcgtcttcaatgct

SEQ ID NO: 1890 - RNA, 20 nt, synthetic construct
  misc_feature 1..20: note = Synthetic
  source 1..20: mol_type = other RNA
caatgagtaaccctcctgat

SEQ ID NO: 1891 - RNA, 20 nt, synthetic construct
  misc_feature 1..20: note = Synthetic
  source 1..20: mol_type = other RNA
tggtagtcacatattcactc

SEQ ID NO: 1892 - RNA, 20 nt, synthetic construct
  misc_feature 1..20: note = Synthetic
  source 1..20: mol_type = other RNA
agctgtccaacaggcgatgt

SEQ ID NO: 1893 - RNA, 20 nt, synthetic construct
  misc_feature 1..20: note = Synthetic
  source 1..20: mol_type = other RNA
tggcagtgtttccagcgaat

SEQ ID NO: 1894 - RNA, 20 nt, synthetic construct
  misc_feature 1..20: note = Synthetic
  source 1..20: mol_type = other RNA
atgacctactggtctgactc

SEQ ID NO: 1895 - RNA, 20 nt, synthetic construct
  misc_feature 1..20: note = Synthetic
  source 1..20: mol_type = other RNA
tgcgtctctctccgtgtcgt

SEQ ID NO: 1896 - RNA, 20 nt, synthetic construct
  misc_feature 1..20: note = Synthetic
  source 1..20: mol_type = other RNA
cattttgtcacgcatcaatc

SEQ ID NO: 1897 - RNA, 20 nt, synthetic construct
  misc_feature 1..20: note = Synthetic
  source 1..20: mol_type = other RNA
cagattgatgcgtgacaaaa

SEQ ID NO: 1898 - RNA, 20 nt, synthetic construct
  misc_feature 1..20: note = Synthetic
  source 1..20: mol_type = other RNA
ctttagtagtgaatcggatc

SEQ ID NO: 1899 - RNA, 20 nt, synthetic construct
  misc_feature 1..20: note = Synthetic
  source 1..20: mol_type = other RNA
cagcatccgggatgacctac

SEQ ID NO: 1900 - RNA, 20 nt, synthetic construct
  misc_feature 1..20: note = Synthetic
  source 1..20: mol_type = other RNA
ttgtttgtgccccgacgaca

SEQ ID NO: 1901 - RNA, 20 nt, synthetic construct
  misc_feature 1..20: note = Synthetic
  source 1..20: mol_type = other RNA
cgtctctctccgtgtcgtcg

SEQ ID NO: 1902 - RNA, 20 nt, synthetic construct
  misc_feature 1..20: note = Synthetic
  source 1..20: mol_type = other RNA
tagtctttgttgagcatccg

SEQ ID NO: 1903 - RNA, 20 nt, synthetic construct
  misc_feature 1..20: note = Synthetic
  source 1..20: mol_type = other RNA
tgtcaatcggttcccttcaa

SEQ ID NO: 1904 - RNA, 20 nt, synthetic construct
  misc_feature 1..20: note = Synthetic
  source 1..20: mol_type = other RNA
actcttggaactcaacttag

SEQ ID NO: 1905 - RNA, 20 nt, synthetic construct
  misc_feature 1..20: note = Synthetic
  source 1..20: mol_type = other RNA
ggatgctctacgaatacaga

SEQ ID NO: 1906 - RNA, 20 nt, synthetic construct
  misc_feature 1..20: note = Synthetic
  source 1..20: mol_type = other RNA
tccgaatagttgaacataac

SEQ ID NO: 1907 - RNA, 20 nt, synthetic construct
  misc_feature 1..20: note = Synthetic
  source 1..20: mol_type = other RNA
tggtacagtcacagtaagac

SEQ ID NO: 1908 - RNA, 20 nt, synthetic construct
  misc_feature 1..20: note = Synthetic
  source 1..20: mol_type = other RNA
tttggtcacactatcatacg

SEQ ID NO: 1909 - RNA, 20 nt, synthetic construct
  misc_feature 1..20: note = Synthetic
  source 1..20: mol_type = other RNA
ttggtcacactatcatacga

SEQ ID NO: 1910 - RNA, 20 nt, synthetic construct
  misc_feature 1..20: note = Synthetic
  source 1..20: mol_type = other RNA
cagcttcagaggtcgagcaa

SEQ ID NO: 1911 - RNA, 20 nt, synthetic construct
  misc_feature 1..20: note = Synthetic
  source 1..20: mol_type = other RNA
atccatccatcccttaaacg

SEQ ID NO: 1912 - RNA, 20 nt, synthetic construct
  misc_feature 1..20: note = Synthetic
  source 1..20: mol_type = other RNA
ctcttgtttgcgtttcaacg

SEQ ID NO: 1913 - RNA, 20 nt, synthetic construct
  misc_feature 1..20: note = Synthetic
  source 1..20: mol_type = other RNA
agagatgtttgatgtaagcg

SEQ ID NO: 1914 - RNA, 20 nt, synthetic construct
  misc_feature 1..20: note = Synthetic
  source 1..20: mol_type = other RNA
gtcacactatcatacgaggg

SEQ ID NO: 1915 - RNA, 20 nt, synthetic construct
  misc_feature 1..20: note = Synthetic
  source 1..20: mol_type = other RNA
ttgagtcatgagacgaaata

SEQ ID NO: 1916 - RNA, 20 nt, synthetic construct
  misc_feature 1..20: note = Synthetic
  source 1..20: mol_type = other RNA
ggagccacggatgctcagta

SEQ ID NO: 1917 - RNA, 20 nt, synthetic construct
  misc_feature 1..20: note = Synthetic
  source 1..20: mol_type = other RNA
ggtagaagggcccccgacca

SEQ ID NO: 1918 - RNA, 20 nt, synthetic construct
  misc_feature 1..20: note = Synthetic
  source 1..20: mol_type = other RNA
tatggagcactatcccatga

SEQ ID NO: 1919 - RNA, 20 nt, synthetic construct
  misc_feature 1..20: note = Synthetic
  source 1..20: mol_type = other RNA
atgattgtgaactcccacgc

SEQ ID NO: 1920 - RNA, 20 nt, synthetic construct
  misc_feature 1..20: note = Synthetic
  source 1..20: mol_type = other RNA
gatattggagctcccgccga

SEQ ID NO: 1921 - RNA, 20 nt, synthetic construct
  misc_feature 1..20: note = Synthetic
  source 1..20: mol_type = other RNA
ggtagcgtctgtaagccctc

SEQ ID NO: 1922 - RNA, 20 nt, synthetic construct
  misc_feature 1..20: note = Synthetic
  source 1..20: mol_type = other RNA
ccagtctggagggttactca

SEQ ID NO: 1923 - RNA, 20 nt, synthetic construct
  misc_feature 1..20: note = Synthetic
  source 1..20: mol_type = other RNA
ctctccaagacgcaacagta

SEQ ID NO: 1924 - RNA, 20 nt, synthetic construct
  misc_feature 1..20: note = Synthetic
  source 1..20: mol_type = other RNA
actgctgaactgctccgtca

SEQ ID NO: 1925 - RNA, 20 nt, synthetic construct
  misc_feature 1..20: note = Synthetic
  source 1..20: mol_type = other RNA
agttctccgatcattccggc

SEQ ID NO: 1926 - RNA, 20 nt, synthetic construct
  misc_feature 1..20: note = Synthetic
  source 1..20: mol_type = other RNA
atcatacgagggtggagacg

SEQ ID NO: 1927 - RNA, 20 nt, synthetic construct
  misc_feature 1..20: note = Synthetic
  source 1..20: mol_type = other RNA
cagtcagtgctggtaccgcc

SEQ ID NO: 1928 - RNA, 20 nt, synthetic construct
  misc_feature 1..20: note = Synthetic
  source 1..20: mol_type = other RNA
tgtaggcctgaagaccattg

SEQ ID NO: 1929 - RNA, 20 nt, synthetic construct
  misc_feature 1..20: note = Synthetic
  source 1..20: mol_type = other RNA
ctgctgaactgctccgtcat

SEQ ID NO: 1930 - RNA, 20 nt, synthetic construct
  misc_feature 1..20: note = Synthetic
  source 1..20: mol_type = other RNA
ccatgagtaaccctccagac

SEQ ID NO: 1931 - RNA, 20 nt, synthetic construct
  misc_feature 1..20: note = Synthetic
  source 1..20: mol_type = other RNA
ctaagcgtgtttgcgctaat

SEQ ID NO: 1932 - RNA, 20 nt, synthetic construct
  misc_feature 1..20: note = Synthetic
  source 1..20: mol_type = other RNA
tagtccttactgagcatccg

SEQ ID NO: 1933 - RNA, 20 nt, synthetic construct
  misc_feature 1..20: note = Synthetic
  source 1..20: mol_type = other RNA
gcacgaacagagagtctctt

SEQ ID NO: 1934 - RNA, 20 nt, synthetic construct
  misc_feature 1..20: note = Synthetic
  source 1..20: mol_type = other RNA
tggtgtggtctccctggtcg

SEQ ID NO: 1935 - RNA, 20 nt, synthetic construct
  misc_feature 1..20: note = Synthetic
  source 1..20: mol_type = other RNA
ttgagagcaatcaaactgcc

SEQ ID NO: 1936 - RNA, 20 nt, synthetic construct
  misc_feature 1..20: note = Synthetic
  source 1..20: mol_type = other RNA
cgtttcaacgtggtcgtaat

SEQ ID NO: 1937 - RNA, 20 nt, synthetic construct
  misc_feature 1..20: note = Synthetic
  source 1..20: mol_type = other RNA
gcgttgttcaatagcagcaa

SEQ ID NO: 1938 - RNA, 20 nt, synthetic construct
  misc_feature 1..20: note = Synthetic
  source 1..20: mol_type = other RNA
gagacccaaacaggaacgca

SEQ ID NO: 1939 - RNA, 20 nt, synthetic construct
  misc_feature 1..20: note = Synthetic
  source 1..20: mol_type = other RNA
acgggatccatggaattggt

SEQ ID NO: 1940 - RNA, 20 nt, synthetic construct
  misc_feature 1..20: note = Synthetic
  source 1..20: mol_type = other RNA
aaatgacagagtccgaaaat

SEQ ID NO: 1941 - RNA, 20 nt, synthetic construct
  misc_feature 1..20: note = Synthetic
  source 1..20: mol_type = other RNA
ctcgccctactgttgcgtct

SEQ ID NO: 1942 - RNA, 20 nt, synthetic construct
  misc_feature 1..20: note = Synthetic
  source 1..20: mol_type = other RNA
tctctccaagacgcaacagt

SEQ ID NO: 1943 - RNA, 20 nt, synthetic construct
  misc_feature 1..20: note = Synthetic
  source 1..20: mol_type = other RNA
catagcgctgtggactgcaa

SEQ ID NO: 1944 - RNA, 20 nt, synthetic construct
  misc_feature 1..20: note = Synthetic
  source 1..20: mol_type = other RNA
ctgctaaagtgggttgcata

SEQ ID NO: 1945 - RNA, 20 nt, synthetic construct
  misc_feature 1..20: note = Synthetic
  source 1..20: mol_type = other RNA
gctcttccatctgtattcga

SEQ ID NO: 1946 - RNA, 20 nt, synthetic construct
  misc_feature 1..20: note = Synthetic
  source 1..20: mol_type = other RNA
aatttaccagccggaatgat

SEQ ID NO: 1947 - RNA, 20 nt, synthetic construct
  misc_feature 1..20: note = Synthetic
  source 1..20: mol_type = other RNA
gcgtgggagttcacaatcat

SEQ ID NO: 1948 - RNA, 20 nt, synthetic construct
  misc_feature 1..20: note = Synthetic
  source 1..20: mol_type = other RNA
gcatactcacatcaacaatc

SEQ ID NO: 1949 - RNA, 20 nt, synthetic construct
  misc_feature 1..20: note = Synthetic
  source 1..20: mol_type = other RNA
aactttgataacgtaggact

SEQ ID NO: 1950 - RNA, 20 nt, synthetic construct
  misc_feature 1..20: note = Synthetic
  source 1..20: mol_type = other RNA
cacgttgaaacgcaaacaag

SEQ ID NO: 1951 - RNA, 20 nt, synthetic construct
  misc_feature 1..20: note = Synthetic
  source 1..20: mol_type = other RNA
gtaggcctgaagaccattgt

SEQ ID NO: 1952 - RNA, 20 nt, synthetic construct
  misc_feature 1..20: note = Synthetic
  source 1..20: mol_type = other RNA
gggtagaagggcccccgacc

SEQ ID NO: 1953 - RNA, 20 nt, synthetic construct
  misc_feature 1..20: note = Synthetic
  source 1..20: mol_type = other RNA
attcagcagcgagtcagata

SEQ ID NO: 1954 - RNA, 20 nt, synthetic construct
  misc_feature 1..20: note = Synthetic
  source 1..20: mol_type = other RNA
tgtcttcagattccgatttt

SEQ ID NO: 1955 - RNA, 20 nt, synthetic construct
  misc_feature 1..20: note = Synthetic
  source 1..20: mol_type = other RNA
gcatggtgggcatttctgtc

SEQ ID NO: 1956 - RNA, 20 nt, synthetic construct
  misc_feature 1..20: note = Synthetic
  source 1..20: mol_type = other RNA
ccgttgtcatgttaacacag

SEQ ID NO: 1957 - RNA, 20 nt, synthetic construct
  misc_feature 1..20: note = Synthetic
  source 1..20: mol_type = other RNA
atggtggaaacggatgacca

SEQ ID NO: 1958 - RNA, 20 nt, synthetic construct
  misc_feature 1..20: note = Synthetic
  source 1..20: mol_type = other RNA
cctagacattacgtgctgct

SEQ ID NO: 1959 - RNA, 20 nt, synthetic construct
  misc_feature 1..20: note = Synthetic
  source 1..20: mol_type = other RNA
ctcttggcaagcaagctcgg

SEQ ID NO: 1960 - RNA, 20 nt, synthetic construct
  misc_feature 1..20: note = Synthetic
  source 1..20: mol_type = other RNA
tcaaaagcagaatcgcttgg

SEQ ID NO: 1961 - RNA, 20 nt, synthetic construct
  misc_feature 1..20: note = Synthetic
  source 1..20: mol_type = other RNA
gaccaagctccattaaactg

SEQ ID NO: 1962 - RNA, 20 nt, synthetic construct
  misc_feature 1..20: note = Synthetic
  source 1..20: mol_type = other RNA
gttgatccgggacaaaacta

SEQ ID NO: 1963 - RNA, 20 nt, synthetic construct
  misc_feature 1..20: note = Synthetic
  source 1..20: mol_type = other RNA
agtcatggggtagtgctcca

SEQ ID NO: 1964 - RNA, 20 nt, synthetic construct
  misc_feature 1..20: note = Synthetic
  source 1..20: mol_type = other RNA
aaccgggataaggctcttag

SEQ ID NO: 1965 - RNA, 20 nt, synthetic construct
  misc_feature 1..20: note = Synthetic
  source 1..20: mol_type = other RNA
ctagggtcatgtatttgccc

SEQ ID NO: 1966 - RNA, 20 nt, synthetic construct
  misc_feature 1..20: note = Synthetic
  source 1..20: mol_type = other RNA
gtgctcaacaatactgtagc

SEQ ID NO: 1967 - RNA, 20 nt, synthetic construct
  misc_feature 1..20: note = Synthetic
  source 1..20: mol_type = other RNA
gatgttgttctaccccgaga

SEQ ID NO: 1968 - RNA, 20 nt, synthetic construct
  misc_feature 1..20: note = Synthetic
  source 1..20: mol_type = other RNA
cagtttcagaggtcgggcaa

SEQ ID NO: 1969 - RNA, 20 nt, synthetic construct
  misc_feature 1..20: note = Synthetic
  source 1..20: mol_type = other RNA
cagtctctcttgagtatccg

SEQ ID NO: 1970 - RNA, 20 nt, synthetic construct
  misc_feature 1..20: note = Synthetic
  source 1..20: mol_type = other RNA
tcatgagtcgaaatagagac

SEQ ID NO: 1971 - RNA, 20 nt, synthetic construct
  misc_feature 1..20: note = Synthetic
  source 1..20: mol_type = other RNA
tcaagactctgaaagttcga

SEQ ID NO: 1972 - RNA, 20 nt, synthetic construct
  misc_feature 1..20: note = Synthetic
  source 1..20: mol_type = other RNA
gaccctgacacaattcaccc

SEQ ID NO: 1973 - RNA, 20 nt, synthetic construct
  misc_feature 1..20: note = Synthetic
  source 1..20: mol_type = other RNA
aatgaacactaggttgatcc

SEQ ID NO: 1974 - RNA, 20 nt, synthetic construct
  misc_feature 1..20: note = Synthetic
  source 1..20: mol_type = other RNA
ctatcttgcactgcttcaag

SEQ ID NO: 1975 - RNA, 20 nt, synthetic construct
  misc_feature 1..20: note = Synthetic
  source 1..20: mol_type = other RNA
ccttctcagtagtggtgcat

SEQ ID NO: 1976 - RNA, 20 nt, synthetic construct
  misc_feature 1..20: note = Synthetic
  source 1..20: mol_type = other RNA
caattggcactgtgacggtg

SEQ ID NO: 1977 - RNA, 20 nt, synthetic construct
  misc_feature 1..20: note = Synthetic
  source 1..20: mol_type = other RNA
tccagtacctacaccactgg

SEQ ID NO: 1978 - RNA, 20 nt, synthetic construct
  misc_feature 1..20: note = Synthetic
  source 1..20: mol_type = other RNA
tgtactgcgatcattcagac

SEQ ID NO: 1979 - RNA, 20 nt, synthetic construct
  misc_feature 1..20: note = Synthetic
  source 1..20: mol_type = other RNA
ttacgtttcttcgtgatcca

SEQ ID NO: 1980 - RNA, 20 nt, synthetic construct
  misc_feature 1..20: note = Synthetic
  source 1..20: mol_type = other RNA
gatggtggaaacggatgacc

SEQ ID NO: 1981 - RNA, 20 nt, synthetic construct
  misc_feature 1..20: note = Synthetic
  source 1..20: mol_type = other RNA
agagccttatcccggtttga

SEQ ID NO: 1982 - RNA, 20 nt, synthetic construct
  misc_feature 1..20: note = Synthetic
  source 1..20: mol_type = other RNA
ccaatgcaccactactgaga

SEQ ID NO: 1983 - RNA, 20 nt, synthetic construct
  misc_feature 1..20: note = Synthetic
  source 1..20: mol_type = other RNA
tgttttgctattgcgtcttg

SEQ ID NO: 1984 - RNA, 20 nt, synthetic construct
  misc_feature 1..20: note = Synthetic
  source 1..20: mol_type = other RNA
ttcaaaagcagaatcgcttg

SEQ ID NO: 1985 - RNA, 20 nt, synthetic construct
  misc_feature 1..20: note = Synthetic
  source 1..20: mol_type = other RNA
taactccactaaaccctgtt

SEQ ID NO: 1986 - RNA, 20 nt, synthetic construct
  misc_feature 1..20: note = Synthetic
  source 1..20: mol_type = other RNA
ctgccagggtgaattgtgtc

SEQ ID NO: 1987 - RNA, 20 nt, synthetic construct
  misc_feature 1..20: note = Synthetic
  source 1..20: mol_type = other RNA
tcttactgctgggcgaggta

SEQ ID NO: 1988 - RNA, 20 nt, synthetic construct
  misc_feature 1..20: note = Synthetic
  source 1..20: mol_type = other RNA
acccgaagaagaccttaaac

SEQ ID NO: 1989 - RNA, 20 nt, synthetic construct
  misc_feature 1..20: note = Synthetic
  source 1..20: mol_type = other RNA
acgcaacagtaacgttagtc

SEQ ID NO: 1990 - RNA, 20 nt, synthetic construct
  misc_feature 1..20: note = Synthetic
  source 1..20: mol_type = other RNA
gacctctaagagccttatcc

SEQ ID NO: 1991 - RNA, 20 nt, synthetic construct
  misc_feature 1..20: note = Synthetic
  source 1..20: mol_type = other RNA
tcggtgccatcaaatcatta

SEQ ID NO: 1992 - RNA, 20 nt, synthetic construct
  misc_feature 1..20: note = Synthetic
  source 1..20: mol_type = other RNA
agcctcagtttaatggagct

SEQ ID NO: 1993 - RNA, 20 nt, synthetic construct
  misc_feature 1..20: note = Synthetic
  source 1..20: mol_type = other RNA
gacagaaatgtccgccatgc

SEQ ID NO: 1994 - RNA, 20 nt, synthetic construct
  misc_feature 1..20: note = Synthetic
  source 1..20: mol_type = other RNA
tcagctctaacgtcacctac

SEQ ID NO: 1995 - RNA, 20 nt, synthetic construct
  misc_feature 1..20: note = Synthetic
  source 1..20: mol_type = other RNA
ctcatttggaccttaccaac

SEQ ID NO: 1996 - RNA, 20 nt, synthetic construct
  misc_feature 1..20: note = Synthetic
  source 1..20: mol_type = other RNA
acccaaaacacgctttgtaa

SEQ ID NO: 1997 - RNA, 20 nt, synthetic construct
  misc_feature 1..20: note = Synthetic
  source 1..20: mol_type = other RNA
actactacttcactataggc

SEQ ID NO: 1998 - RNA, 20 nt, synthetic construct
  misc_feature 1..20: note = Synthetic
  source 1..20: mol_type = other RNA
ggttgatccgggacaaaact

SEQ ID NO: 1999 - RNA, 20 nt, synthetic construct
  misc_feature 1..20: note = Synthetic
  source 1..20: mol_type = other RNA
cagaaagcttctttaccgac

SEQ ID NO: 2000 - RNA, 20 nt, synthetic construct
  misc_feature 1..20: note = Synthetic
  source 1..20: mol_type = other RNA
cttactgctgggcgaggtat

SEQ ID NO: 2001 - RNA, 20 nt, synthetic construct
  misc_feature 1..20: note = Synthetic
  source 1..20: mol_type = other RNA
ccggaagcttgttttactga

SEQ ID NO: 2002 - RNA, 20 nt, synthetic construct
  misc_feature 1..20: note = Synthetic
  source 1..20: mol_type = other RNA
accaccagtggtgtaggtac

SEQ ID NO: 2003 - RNA, 20 nt, synthetic construct
  misc_feature 1..20: note = Synthetic
  source 1..20: mol_type = other RNA
catttgaagacagcgaaagc

SEQ ID NO: 2004 - RNA, 20 nt, synthetic construct
  misc_feature 1..20: note = Synthetic
  source 1..20: mol_type = other RNA
gcggatcacacggaacagcg

SEQ ID NO: 2005 - RNA, 20 nt, synthetic construct
  misc_feature 1..20: note = Synthetic
  source 1..20: mol_type = other RNA
tatggaactgctgcgccccg

SEQ ID NO: 2006 - RNA, 20 nt, synthetic construct
  misc_feature 1..20: note = Synthetic
  source 1..20: mol_type = other RNA
gtgttggtgtcgttgaacgg

SEQ ID NO: 2007 - RNA, 20 nt, synthetic construct
  misc_feature 1..20: note = Synthetic
  source 1..20: mol_type = other RNA
gggacgccggacccactatg

SEQ ID NO: 2008 - RNA, 20 nt, synthetic construct
  misc_feature 1..20: note = Synthetic
  source 1..20: mol_type = other RNA
agggcactgtcccgattcga

SEQ ID NO: 2009 - RNA, 20 nt, synthetic construct
  misc_feature 1..20: note = Synthetic
  source 1..20: mol_type = other RNA
cgtcttccgcatcctgtgcg

SEQ ID NO: 2010 - RNA, 20 nt, synthetic construct
  misc_feature 1..20: note = Synthetic
  source 1..20: mol_type = other RNA
catggtatgccaacgacacg

SEQ ID NO: 2011 - RNA, 20 nt, synthetic construct
  misc_feature 1..20: note = Synthetic
  source 1..20: mol_type = other RNA
gttggtgtcgttgaacggcg

SEQ ID NO: 2012 - RNA, 20 nt, synthetic construct
  misc_feature 1..20: note = Synthetic
  source 1..20: mol_type = other RNA
tgtcctgcggctgatccgcg

SEQ ID NO: 2013 - RNA, 20 nt, synthetic construct
  misc_feature 1..20: note = Synthetic
  source 1..20: mol_type = other RNA
gatgaacatgctgaacagcg

SEQ ID NO: 2014 - RNA, 20 nt, synthetic construct
  misc_feature 1..20: note = Synthetic
  source 1..20: mol_type = other RNA
cgtgtcctgcggctgatccg

SEQ ID NO: 2015 - RNA, 20 nt, synthetic construct
  misc_feature 1..20: note = Synthetic
  source 1..20: mol_type = other RNA
gagggcactgtcccgattcg

SEQ ID NO: 2016 - RNA, 20 nt, synthetic construct
  misc_feature 1..20: note = Synthetic
  source 1..20: mol_type = other RNA
gacgagttcccatcatagag

SEQ ID NO: 2017 - RNA, 20 nt, synthetic construct
  misc_feature 1..20: note = Synthetic
  source 1..20: mol_type = other RNA
gcccaacttgatgcgcccga

SEQ ID NO: 2018 - RNA, 20 nt, synthetic construct
  misc_feature 1..20: note = Synthetic
  source 1..20: mol_type = other RNA
cagcctggacacatcgcaag

SEQ ID NO: 2019 - RNA, 20 nt, synthetic construct
  misc_feature 1..20: note = Synthetic
  source 1..20: mol_type = other RNA
tcagggctgaagacgatcgt

SEQ ID NO: 2020 - RNA, 20 nt, synthetic construct
  misc_feature 1..20: note = Synthetic
  source 1..20: mol_type = other RNA
cttcagcgtagtcaggcgcg

SEQ ID NO: 2021 - RNA, 20 nt, synthetic construct
  misc_feature 1..20: note = Synthetic
  source 1..20: mol_type = other RNA
ccgcgcctgactacgctgaa

SEQ ID NO: 2022 - RNA, 20 nt, synthetic construct
  misc_feature 1..20: note = Synthetic
  source 1..20: mol_type = other RNA
ctacggagaccccccgccgg

SEQ ID NO: 2023 - RNA, 20 nt, synthetic construct
  misc_feature 1..20: note = Synthetic
  source 1..20: mol_type = other RNA
gatctacggagaccccccgc

SEQ ID NO: 2024 - RNA, 20 nt, synthetic construct
  misc_feature 1..20: note = Synthetic
  source 1..20: mol_type = other RNA
cctgttcgagatcaccacgt

SEQ ID NO: 2025 - RNA, 20 nt, synthetic construct
  misc_feature 1..20: note = Synthetic
  source 1..20: mol_type = other RNA
cacgcccaatccgcgccagg

SEQ ID NO: 2026 - RNA, 20 nt, synthetic construct
  misc_feature 1..20: note = Synthetic
  source 1..20: mol_type = other RNA
gaagtggtggactctgcgca

SEQ ID NO: 2027 - RNA, 20 nt, synthetic construct
  misc_feature 1..20: note = Synthetic
  source 1..20: mol_type = other RNA
agctgactacaagccccccg

SEQ ID NO: 2028 - RNA, 20 nt, synthetic construct
  misc_feature 1..20: note = Synthetic
  source 1..20: mol_type = other RNA
cgacctggagatgcccaccg

SEQ ID NO: 2029 - RNA, 20 nt, synthetic construct
  misc_feature 1..20: note = Synthetic
  source 1..20: mol_type = other RNA
tcggactcctcggaggcgat

SEQ ID NO: 2030 - RNA, 20 nt, synthetic construct
  misc_feature 1..20: note = Synthetic
  source 1..20: mol_type = other RNA
gcgcggcaggttgcagtcca

SEQ ID NO: 2031 - RNA, 20 nt, synthetic construct
  misc_feature 1..20: note = Synthetic
  source 1..20: mol_type = other RNA
gcttttgtgtaccagacgga

SEQ ID NO: 2032 - RNA, 20 nt, synthetic construct
  misc_feature 1..20: note = Synthetic
  source 1..20: mol_type = other RNA
ctaggcctggccaacgtaca

SEQ ID NO: 2033 - RNA, 20 nt, synthetic construct
  misc_feature 1..20: note = Synthetic
  source 1..20: mol_type = other RNA
ccctacgagtatttccagca

SEQ ID NO: 2034 - RNA, 20 nt, synthetic construct
  misc_feature 1..20: note = Synthetic
  source 1..20: mol_type = other RNA
gatcgtcatggacccgttcg

SEQ ID NO: 2035 - RNA, 20 nt, synthetic construct
  misc_feature 1..20: note = Synthetic
  source 1..20: mol_type = other RNA
atgagtgcatcaagaccggg

SEQ ID NO: 2036 - RNA, 20 nt, synthetic construct
  misc_feature 1..20: note = Synthetic
  source 1..20: mol_type = other RNA
ccaatcaaaggtatcgttgg

SEQ ID NO: 2037 - RNA, 20 nt, synthetic construct
  misc_feature 1..20: note = Synthetic
  source 1..20: mol_type = other RNA
cgtgtcattgctgtaccacg

SEQ ID NO: 2038 - RNA, 20 nt, synthetic construct
  misc_feature 1..20: note = Synthetic
  source 1..20: mol_type = other RNA
gtcagggctgaagacgatcg

SEQ ID NO: 2039 - RNA, 20 nt, synthetic construct
  misc_feature 1..20: note = Synthetic
  source 1..20: mol_type = other RNA
ctcatcaagatactggcccg

SEQ ID NO: 2040 - RNA, 20 nt, synthetic construct
  misc_feature 1..20: note = Synthetic
  source 1..20: mol_type = other RNA
gggatgccgatgacctccgg

SEQ ID NO: 2041 - RNA, 20 nt, synthetic construct
  misc_feature 1..20: note = Synthetic
  source 1..20: mol_type = other RNA
gatgccgatgacctccggcg

SEQ ID NO: 2042 - RNA, 20 nt, synthetic construct
  misc_feature 1..20: note = Synthetic
  source 1..20: mol_type = other RNA
atgtaccgccacagccacga

SEQ ID NO: 2043 - RNA, 20 nt, synthetic construct
  misc_feature 1..20: note = Synthetic
  source 1..20: mol_type = other RNA
agatccagagggcctaccgc

SEQ ID NO: 2044 - RNA, 20 nt, synthetic construct
  misc_feature 1..20: note = Synthetic
  source 1..20: mol_type = other RNA
ttgggcttggcaatcctcag

SEQ ID NO: 2045 - RNA, 20 nt, synthetic construct
  misc_feature 1..20: note = Synthetic
  source 1..20: mol_type = other RNA
cggatcacacggaacagcgt

SEQ ID NO: 2046 - RNA, 20 nt, synthetic construct
  misc_feature 1..20: note = Synthetic
  source 1..20: mol_type = other RNA
cgaaggcctgcttcgtcacg

SEQ ID NO: 2047 - RNA, 20 nt, synthetic construct
  misc_feature 1..20: note = Synthetic
  source 1..20: mol_type = other RNA
cctatcccactatacttagg

SEQ ID NO: 2048 - RNA, 20 nt, synthetic construct
  misc_feature 1..20: note = Synthetic
  source 1..20: mol_type = other RNA
tgagaggttcgacatctccg

SEQ ID NO: 2049 - RNA, 20 nt, synthetic construct
  misc_feature 1..20: note = Synthetic
  source 1..20: mol_type = other RNA
gatgtcgaacctctcagagg

SEQ ID NO: 2050 - RNA, 20 nt, synthetic construct
  misc_feature 1..20: note = Synthetic
  source 1..20: mol_type = other RNA
gtcccgattcgagggcatga

SEQ ID NO: 2051 - RNA, 20 nt, synthetic construct
  misc_feature 1..20: note = Synthetic
  source 1..20: mol_type = other RNA
catctcgccatcctcatccg

SEQ ID NO: 2052 - RNA, 20 nt, synthetic construct
  misc_feature 1..20: note = Synthetic
  source 1..20: mol_type = other RNA
gtgcatctcaggccgactgg

SEQ ID NO: 2053 - RNA, 20 nt, synthetic construct
  misc_feature 1..20: note = Synthetic
  source 1..20: mol_type = other RNA
agttcgcacctggatcactg

SEQ ID NO: 2054 - RNA, 20 nt, synthetic construct
  misc_feature 1..20: note = Synthetic
  source 1..20: mol_type = other RNA
agtcggcgagatcttcactg

SEQ ID NO: 2055 - RNA, 20 nt, synthetic construct
  misc_feature 1..20: note = Synthetic
  source 1..20: mol_type = other RNA
gatgaggccctctcgctcag

SEQ ID NO: 2056 - RNA, 20 nt, synthetic construct
  misc_feature 1..20: note = Synthetic
  source 1..20: mol_type = other RNA
tcgacatacttggtccaggg

SEQ ID NO: 2057 - RNA, 20 nt, synthetic construct
  misc_feature 1..20: note = Synthetic
  source 1..20: mol_type = other RNA
agcgataacctccaggtgcg

SEQ ID NO: 2058 - RNA, 20 nt, synthetic construct
  misc_feature 1..20: note = Synthetic
  source 1..20: mol_type = other RNA
ccgcacctggaggttatcgc

SEQ ID NO: 2059 - RNA, 20 nt, synthetic construct
  misc_feature 1..20: note = Synthetic
  source 1..20: mol_type = other RNA
actccggcgcaagcacgaag

SEQ ID NO: 2060 - RNA, 20 nt, synthetic construct
  misc_feature 1..20: note = Synthetic
  source 1..20: mol_type = other RNA
ttcgtgcttgcgccggagtg

SEQ ID NO: 2061 - RNA, 20 nt, synthetic construct
  misc_feature 1..20: note = Synthetic
  source 1..20: mol_type = other RNA
acttgtatacccacccacga

SEQ ID NO: 2062 - RNA, 20 nt, synthetic construct
  misc_feature 1..20: note = Synthetic
  source 1..20: mol_type = other RNA
gtggtgtccaccgcacagca

SEQ ID NO: 2063 - RNA, 20 nt, synthetic construct
  misc_feature 1..20: note = Synthetic
  source 1..20: mol_type = other RNA
tgggcgagacggttccagca

SEQ ID NO: 2064 - RNA, 20 nt, synthetic construct
  misc_feature 1..20: note = Synthetic
  source 1..20: mol_type = other RNA
atctacacacggagcctggg

SEQ ID NO: 2065 - RNA, 20 nt, synthetic construct
  misc_feature 1..20: note = Synthetic
  source 1..20: mol_type = other RNA
cttccaccccatccggagag

SEQ ID NO: 2066 - RNA, 20 nt, synthetic construct
  misc_feature 1..20: note = Synthetic
  source 1..20: mol_type = other RNA
ccaacagcaatggctctcgg

SEQ ID NO: 2067 - RNA, 20 nt, synthetic construct
  misc_feature 1..20: note = Synthetic
  source 1..20: mol_type = other RNA
ctgtggatgtccatcaagca

SEQ ID NO: 2068 - RNA, 20 nt, synthetic construct
  misc_feature 1..20: note = Synthetic
  source 1..20: mol_type = other RNA
atgctcccgcggctggaacg

SEQ ID NO: 2069 - RNA, 20 nt, synthetic construct
  misc_feature 1..20: note = Synthetic
  source 1..20: mol_type = other RNA
cgtggtcgcaatggcctatg

SEQ ID NO: 2070 - RNA, 20 nt, synthetic construct
  misc_feature 1..20: note = Synthetic
  source 1..20: mol_type = other RNA
tggctgcaggacatgtccgg

SEQ ID NO: 2071 - RNA, 20 nt, synthetic construct
  misc_feature 1..20: note = Synthetic
  source 1..20: mol_type = other RNA
cggcaccaacggctccgtgg

SEQ ID NO: 2072 - RNA, 20 nt, synthetic construct
  misc_feature 1..20: note = Synthetic
  source 1..20: mol_type = other RNA
ccaggccgaggctcacacga

SEQ ID NO: 2073 - RNA, 20 nt, synthetic construct
  misc_feature 1..20: note = Synthetic
  source 1..20: mol_type = other RNA
cacctggaggttatcgctgg

SEQ ID NO: 2074 - RNA, 20 nt, synthetic construct
  misc_feature 1..20: note = Synthetic
  source 1..20: mol_type = other RNA
tggggaccgcatccattgca

SEQ ID NO: 2075 - RNA, 20 nt, synthetic construct
  misc_feature 1..20: note = Synthetic
  source 1..20: mol_type = other RNA
cgcatcctcagactgatccg

SEQ ID NO: 2076 - RNA, 20 nt, synthetic construct
  misc_feature 1..20: note = Synthetic
  source 1..20: mol_type = other RNA
gcgagacggttccagcatgg

SEQ ID NO: 2077 - RNA, 20 nt, synthetic construct
  misc_feature 1..20: note = Synthetic
  source 1..20: mol_type = other RNA
actcttccgcctgatgacgc

SEQ ID NO: 2078 - RNA, 20 nt, synthetic construct
  misc_feature 1..20: note = Synthetic
  source 1..20: mol_type = other RNA
tttaggcaccggtagccctc

SEQ ID NO: 2079 - RNA, 20 nt, synthetic construct
  misc_feature 1..20: note = Synthetic
  source 1..20: mol_type = other RNA
caacggcaccaacggctccg

SEQ ID NO: 2080 - RNA, 20 nt, synthetic construct
  misc_feature 1..20: note = Synthetic
  source 1..20: mol_type = other RNA
atggcggtgaaggtgtacct

SEQ ID NO: 2081 - RNA, 20 nt, synthetic construct
  misc_feature 1..20: note = Synthetic
  source 1..20: mol_type = other RNA
cactcgacatacttggtcca

SEQ ID NO: 2082 - RNA, 20 nt, synthetic construct
  misc_feature 1..20: note = Synthetic
  source 1..20: mol_type = other RNA
aggctcacacgatggactca

SEQ ID NO: 2083 - RNA, 20 nt, synthetic construct
  misc_feature 1..20: note = Synthetic
  source 1..20: mol_type = other RNA
gatgactcggaagagcgtcg

SEQ ID NO: 2084 - RNA, 20 nt, synthetic construct
  misc_feature 1..20: note = Synthetic
  source 1..20: mol_type = other RNA
cggagaattgtactggacca

SEQ ID NO: 2085 - RNA, 20 nt, synthetic construct
  misc_feature 1..20: note = Synthetic
  source 1..20: mol_type = other RNA
tcccaaacttccccgcaaag

SEQ ID NO: 2086 - RNA, 20 nt, synthetic construct
  misc_feature 1..20: note = Synthetic
  source 1..20: mol_type = other RNA
tgggccccatcaagtcactg

SEQ ID NO: 2087 - RNA, 20 nt, synthetic construct
  misc_feature 1..20: note = Synthetic
  source 1..20: mol_type = other RNA
cttcgaggacatctacctag

SEQ ID NO: 2088 - RNA, 20 nt, synthetic construct
  misc_feature 1..20: note = Synthetic
  source 1..20: mol_type = other RNA
caagacctgctaccacatcg

SEQ ID NO: 2089 - RNA, 20 nt, synthetic construct
  misc_feature 1..20: note = Synthetic
  source 1..20: mol_type = other RNA
gtgctccacgatgtggtagc

SEQ ID NO: 2090 - RNA, 20 nt, synthetic construct
  misc_feature 1..20: note = Synthetic
  source 1..20: mol_type = other RNA
cattacctcaccgcaccctg

SEQ ID NO: 2091 - RNA, 20 nt, synthetic construct
  misc_feature 1..20: note = Synthetic
  source 1..20: mol_type = other RNA
ccctactactacttccaaca

SEQ ID NO: 2092 - RNA, 20 nt, synthetic construct
  misc_feature 1..20: note = Synthetic
  source 1..20: mol_type = other RNA
tccgtgtgtagatggcttcg

SEQ ID NO: 2093 - RNA, 20 nt, synthetic construct
  misc_feature 1..20: note = Synthetic
  source 1..20: mol_type = other RNA
tcctcgaagccatctacaca

SEQ ID NO: 2094 - RNA, 20 nt, synthetic construct
  misc_feature 1..20: note = Synthetic
  source 1..20: mol_type = other RNA
cactcagaccacgccatcgg

SEQ ID NO: 2095 - RNA, 20 nt, synthetic construct
  misc_feature 1..20: note = Synthetic
  source 1..20: mol_type = other RNA
gctagagcacccgccagaca

SEQ ID NO: 2096 - RNA, 20 nt, synthetic construct
  misc_feature 1..20: note = Synthetic
  source 1..20: mol_type = other RNA
ggagggctaccggtgcctaa

SEQ ID NO: 2097 - RNA, 20 nt, synthetic construct
  misc_feature 1..20: note = Synthetic
  source 1..20: mol_type = other RNA
cgcaacttcacagcgctcaa

SEQ ID NO: 2098 - RNA, 20 nt, synthetic construct
  misc_feature 1..20: note = Synthetic
  source 1..20: mol_type = other RNA
ctctgccatgcgcttctcga

SEQ ID NO: 2099 - RNA, 20 nt, synthetic construct
  misc_feature 1..20: note = Synthetic
  source 1..20: mol_type = other RNA
tgtagtcagacccccgcacc

SEQ ID NO: 2100 - RNA, 20 nt, synthetic construct
  misc_feature 1..20: note = Synthetic
  source 1..20: mol_type = other RNA
tgtctttcgagtgttgtgcg

SEQ ID NO: 2101 - RNA, 20 nt, synthetic construct
  misc_feature 1..20: note = Synthetic
  source 1..20: mol_type = other RNA
cgtgaagcgcaacagcacgg

SEQ ID NO: 2102 - RNA, 20 nt, synthetic construct
  misc_feature 1..20: note = Synthetic
  source 1..20: mol_type = other RNA
ctcctgcttgcgacgcagtg

SEQ ID NO: 2103 - RNA, 20 nt, synthetic construct
  misc_feature 1..20: note = Synthetic
  source 1..20: mol_type = other RNA
tctgtccttccgcccgtagg

SEQ ID NO: 2104 - RNA, 20 nt, synthetic construct
  misc_feature 1..20: note = Synthetic
  source 1..20: mol_type = other RNA
gcagatggaagagcggttcg

SEQ ID NO: 2105 - RNA, 20 nt, synthetic construct
  misc_feature 1..20: note = Synthetic
  source 1..20: mol_type = other RNA
ctgagtctagcagacgtgga

SEQ ID NO: 2106 - RNA, 20 nt, synthetic construct
  misc_feature 1..20: note = Synthetic
  source 1..20: mol_type = other RNA
gtacccgtacagtcaagttg

SEQ ID NO: 2107 - RNA, 20 nt, synthetic construct
  misc_feature 1..20: note = Synthetic
  source 1..20: mol_type = other RNA
gtcctgcagcgtgcctaccg

SEQ ID NO: 2108 - RNA, 20 nt, synthetic construct
  misc_feature 1..20: note = Synthetic
  source 1..20: mol_type = other RNA
gaacagctgcagtccgatca

SEQ ID NO: 2109 - RNA, 20 nt, synthetic construct
  misc_feature 1..20: note = Synthetic
  source 1..20: mol_type = other RNA
cgcggatgacgagcacagca

SEQ ID NO: 2110 - RNA, 20 nt, synthetic construct
  misc_feature 1..20: note = Synthetic
  source 1..20: mol_type = other RNA
cagctaccgatgacagtgta

SEQ ID NO: 2111 - RNA, 20 nt, synthetic construct
  misc_feature 1..20: note = Synthetic
  source 1..20: mol_type = other RNA
attccggtggatgtctgcac

SEQ ID NO: 2112 - RNA, 20 nt, synthetic construct
  misc_feature 1..20: note = Synthetic
  source 1..20: mol_type = other RNA
gggtacccgtacagtcaagt

SEQ ID NO: 2113 - RNA, 20 nt, synthetic construct
  misc_feature 1..20: note = Synthetic
  source 1..20: mol_type = other RNA
acctagttccgagtagccca

SEQ ID NO: 2114 - RNA, 20 nt, synthetic construct
  misc_feature 1..20: note = Synthetic
  source 1..20: mol_type = other RNA
gagtttgcctttcatctacg

SEQ ID NO: 2115 - RNA, 20 nt, synthetic construct
  misc_feature 1..20: note = Synthetic
  source 1..20: mol_type = other RNA
gattctgtccttccgcccgt

SEQ ID NO: 2116 - RNA, 20 nt, synthetic construct
  misc_feature 1..20: note = Synthetic
  source 1..20: mol_type = other RNA
ggtacccgtacagtcaagtt

SEQ ID NO: 2117 - RNA, 20 nt, synthetic construct
  misc_feature 1..20: note = Synthetic
  source 1..20: mol_type = other RNA
gtgctgccaggtcaacatcg

SEQ ID NO: 2118 - RNA, 20 nt, synthetic construct
  misc_feature 1..20: note = Synthetic
  source 1..20: mol_type = other RNA
tgcagctgtagattcccgga

SEQ ID NO: 2119 - RNA, 20 nt, synthetic construct
  misc_feature 1..20: note = Synthetic
  source 1..20: mol_type = other RNA
accggggacatttggcaagg

SEQ ID NO: 2120 - RNA, 20 nt, synthetic construct
  misc_feature 1..20: note = Synthetic
  source 1..20: mol_type = other RNA
gggatgtccccgtagatgaa

SEQ ID NO: 2121 - RNA, 20 nt, synthetic construct
  misc_feature 1..20: note = Synthetic
  source 1..20: mol_type = other RNA
tcctgactggtcgaagaatg

SEQ ID NO: 2122 - RNA, 20 nt, synthetic construct
  misc_feature 1..20: note = Synthetic
  source 1..20: mol_type = other RNA
caggagacgcccgccgatgt

SEQ ID NO: 2123 - RNA, 20 nt, synthetic construct
  misc_feature 1..20: note = Synthetic
  source 1..20: mol_type = other RNA
accaattagcctcctacggg

SEQ ID NO: 2124 - RNA, 20 nt, synthetic construct
  misc_feature 1..20: note = Synthetic
  source 1..20: mol_type = other RNA
attagcctcctacgggcgga

SEQ ID NO: 2125 - RNA, 20 nt, synthetic construct
  misc_feature 1..20: note = Synthetic
  source 1..20: mol_type = other RNA
ggcccactttaagcagcgtg

SEQ ID NO: 2126 - RNA, 20 nt, synthetic construct
  misc_feature 1..20: note = Synthetic
  source 1..20: mol_type = other RNA
gccctgggctactcggaact

SEQ ID NO: 2127 - RNA, 20 nt, synthetic construct
  misc_feature 1..20: note = Synthetic
  source 1..20: mol_type = other RNA
gcctagataaggaacaccca

SEQ ID NO: 2128 - RNA, 20 nt, synthetic construct
  misc_feature 1..20: note = Synthetic
  source 1..20: mol_type = other RNA
caatgaactgggtggcatcg

SEQ ID NO: 2129 - RNA, 20 nt, synthetic construct
  misc_feature 1..20: note = Synthetic
  source 1..20: mol_type = other RNA
aaccacactgcgtcgcaagc

SEQ ID NO: 2130 - RNA, 20 nt, synthetic construct
  misc_feature 1..20: note = Synthetic
  source 1..20: mol_type = other RNA
gtgcaaaggaaagacgtaac

SEQ ID NO: 2131 - RNA, 20 nt, synthetic construct
  misc_feature 1..20: note = Synthetic
  source 1..20: mol_type = other RNA
gtagctgctccggcgctcgc

SEQ ID NO: 2132 - RNA, 20 nt, synthetic construct
  misc_feature 1..20: note = Synthetic
  source 1..20: mol_type = other RNA
tgtagctgctccggcgctcg

SEQ ID NO: 2133 - RNA, 20 nt, synthetic construct
  misc_feature 1..20: note = Synthetic
  source 1..20: mol_type = other RNA
ggcgtggtgtccctcatcgg

SEQ ID NO: 2134 - RNA, 20 nt, synthetic construct
  misc_feature 1..20: note = Synthetic
  source 1..20: mol_type = other RNA
gtaggaggctaattggtcca

SEQ ID NO: 2135 - RNA, 20 nt, synthetic construct
  misc_feature 1..20: note = Synthetic
  source 1..20: mol_type = other RNA
actgagtctagcagacgtgg

SEQ ID NO: 2136 - RNA, 20 nt, synthetic construct
  misc_feature 1..20: note = Synthetic
  source 1..20: mol_type = other RNA
gtgtgtctgcaagatcaacc

SEQ ID NO: 2137 - RNA, 20 nt, synthetic construct
  misc_feature 1..20: note = Synthetic
  source 1..20: mol_type = other RNA
agtcatgcatatgccagcga

SEQ ID NO: 2138 - RNA, 20 nt, synthetic construct
  misc_feature 1..20: note = Synthetic
  source 1..20: mol_type = other RNA
tcagtgatccgtatcaagaa

SEQ ID NO: 2139 - RNA, 20 nt, synthetic construct
  misc_feature 1..20: note = Synthetic
  source 1..20: mol_type = other RNA
aactgtatcgccaatcacac

SEQ ID NO: 2140 - RNA, 20 nt, synthetic construct
  misc_feature 1..20: note = Synthetic
  source 1..20: mol_type = other RNA
ggtgcagacatccaccggaa

SEQ ID NO: 2141 - RNA, 20 nt, synthetic construct
  misc_feature 1..20: note = Synthetic
  source 1..20: mol_type = other RNA
agcagcgagtcggatcctga

SEQ ID NO: 2142 - RNA, 20 nt, synthetic construct
  misc_feature 1..20: note = Synthetic
  source 1..20: mol_type = other RNA
gagcagggtacgaatccctt

SEQ ID NO: 2143 - RNA, 20 nt, synthetic construct
  misc_feature 1..20: note = Synthetic
  source 1..20: mol_type = other RNA
agcctagataaggaacaccc

SEQ ID NO: 2144 - RNA, 20 nt, synthetic construct
  misc_feature 1..20: note = Synthetic
  source 1..20: mol_type = other RNA
tgactgccatcggcctttgg

SEQ ID NO: 2145 - RNA, 20 nt, synthetic construct
  misc_feature 1..20: note = Synthetic
  source 1..20: mol_type = other RNA
gtcctcccgatgactgccat

SEQ ID NO: 2146 - RNA, 20 nt, synthetic construct
  misc_feature 1..20: note = Synthetic
  source 1..20: mol_type = other RNA
acattcttcgaccagtcagg

SEQ ID NO: 2147 - RNA, 20 nt, synthetic construct
  misc_feature 1..20: note = Synthetic
  source 1..20: mol_type = other RNA
tctgttgtctggcagccgaa

SEQ ID NO: 2148 - RNA, 20 nt, synthetic construct
  misc_feature 1..20: note = Synthetic
  source 1..20: mol_type = other RNA
aggaaaccgtgacccatctg

SEQ ID NO: 2149 - RNA, 20 nt, synthetic construct
  misc_feature 1..20: note = Synthetic
  source 1..20: mol_type = other RNA
ggctgagcgtccatcaacca

SEQ ID NO: 2150 - RNA, 20 nt, synthetic construct
  misc_feature 1..20: note = Synthetic
  source 1..20: mol_type = other RNA
ataggcgagcacatgaaaag

SEQ ID NO: 2151 - RNA, 20 nt, synthetic construct
  misc_feature 1..20: note = Synthetic
  source 1..20: mol_type = other RNA
tatgcccttcgacaccaagg

SEQ ID NO: 2152 - RNA, 20 nt, synthetic construct
  misc_feature 1..20: note = Synthetic
  source 1..20: mol_type = other RNA
cgtgtgtagtcagtgtccag

SEQ ID NO: 2153 - RNA, 20 nt, synthetic construct
  misc_feature 1..20: note = Synthetic
  source 1..20: mol_type = other RNA
cgaatcctacgtctagtcaa

SEQ ID NO: 2154 - RNA, 20 nt, synthetic construct
  misc_feature 1..20: note = Synthetic
  source 1..20: mol_type = other RNA
aaagccaattcctcgaccag

SEQ ID NO: 2155 - RNA, 20 nt, synthetic construct
  misc_feature 1..20: note = Synthetic
  source 1..20: mol_type = other RNA
gtgtccgaagggatttaatg

SEQ ID NO: 2156 - RNA, 20 nt, synthetic construct
  misc_feature 1..20: note = Synthetic
  source 1..20: mol_type = other RNA
gtcgttgtgaatgcactcat

SEQ ID NO: 2157 - RNA, 20 nt, synthetic construct
  misc_feature 1..20: note = Synthetic
  source 1..20: mol_type = other RNA
ttgggtcattagcctaaaca

SEQ ID NO: 2158 - RNA, 20 nt, synthetic construct
  misc_feature 1..20: note = Synthetic
  source 1..20: mol_type = other RNA
ccaccaatgctgccggtgaa

SEQ ID NO: 2159 - RNA, 20 nt, synthetic construct
  misc_feature 1..20: note = Synthetic
  source 1..20: mol_type = other RNA
ccgttcaccggcagcattgg

SEQ ID NO: 2160 - RNA, 20 nt, synthetic construct
  misc_feature 1..20: note = Synthetic
  source 1..20: mol_type = other RNA
gttcaccggcagcattggtg

SEQ ID NO: 2161 - RNA, 20 nt, synthetic construct
  misc_feature 1..20: note = Synthetic
  source 1..20: mol_type = other RNA
cttatagacgttaccgctta

SEQ ID NO: 2162 - RNA, 20 nt, synthetic construct
  misc_feature 1..20: note = Synthetic
  source 1..20: mol_type = other RNA
gccaagttaacatagagtca

SEQ ID NO: 2163 - RNA, 20 nt, synthetic construct
  misc_feature 1..20: note = Synthetic
  source 1..20: mol_type = other RNA
tgacagtgccaattgcacct

SEQ ID NO: 2164 - RNA, 20 nt, synthetic construct
  misc_feature 1..20: note = Synthetic
  source 1..20: mol_type = other RNA
gggctgagcgtccatcaacc

SEQ ID NO: 2165 - RNA, 20 nt, synthetic construct
  misc_feature 1..20: note = Synthetic
  source 1..20: mol_type = other RNA
gaggttgtctacccccaatc

SEQ ID NO: 2166 - RNA, 20 nt, synthetic construct
  misc_feature 1..20: note = Synthetic
  source 1..20: mol_type = other RNA
tcacttttcttcgtgacccg

SEQ ID NO: 2167 - RNA, 20 nt, synthetic construct
  misc_feature 1..20: note = Synthetic
  source 1..20: mol_type = other RNA
ccatgaataacccaccggac

SEQ ID NO: 2168 - RNA, 20 nt, synthetic construct
  misc_feature 1..20: note = Synthetic
  source 1..20: mol_type = other RNA
ccagtccggtgggttattca

SEQ ID NO: 2169 - RNA, 20 nt, synthetic construct
  misc_feature 1..20: note = Synthetic
  source 1..20: mol_type = other RNA
cagcaatgcgttgttcaatg

SEQ ID NO: 2170 - RNA, 20 nt, synthetic construct
  misc_feature 1..20: note = Synthetic
  source 1..20: mol_type = other RNA
atgttagtcaaaatgtgcga

SEQ ID NO: 2171 - RNA, 20 nt, synthetic construct
  misc_feature 1..20: note = Synthetic
  source 1..20: mol_type = other RNA
taaagctctcagtgtccgaa

SEQ ID NO: 2172 - RNA, 20 nt, synthetic construct
  misc_feature 1..20: note = Synthetic
  source 1..20: mol_type = other RNA
ctgtgcattttcccgttcac

SEQ ID NO: 2173 - RNA, 20 nt, synthetic construct
  misc_feature 1..20: note = Synthetic
  source 1..20: mol_type = other RNA
cgttcaccggcagcattggt

SEQ ID NO: 2174 - RNA, 20 nt, synthetic construct
  misc_feature 1..20: note = Synthetic
  source 1..20: mol_type = other RNA
tgttactgctgcgtcgctcc

SEQ ID NO: 2175 - RNA, 20 nt, synthetic construct
  misc_feature 1..20: note = Synthetic
  source 1..20: mol_type = other RNA
gttactgctgcgtcgctcct

SEQ ID NO: 2176 - RNA, 20 nt, synthetic construct
  misc_feature 1..20: note = Synthetic
  source 1..20: mol_type = other RNA
ttactgctgcgtcgctcctg

SEQ ID NO: 2177 - RNA, 20 nt, synthetic construct
  misc_feature 1..20: note = Synthetic
  source 1..20: mol_type = other RNA
accttggtgtcgaagggcat

SEQ ID NO: 2178 - RNA, 20 nt, synthetic construct
  misc_feature 1..20: note = Synthetic
  source 1..20: mol_type = other RNA
agtgtattaacaccacagat

SEQ ID NO: 2179 - RNA, 20 nt, synthetic construct
  misc_feature 1..20: note = Synthetic
  source 1..20: mol_type = other RNA
ttaaagctctcagtgtccga

SEQ ID NO: 2180 - RNA, 20 nt, synthetic construct
  misc_feature 1..20: note = Synthetic
  source 1..20: mol_type = other RNA
agttctgcgatcattcagac

SEQ ID NO: 2181 - RNA, 20 nt, synthetic construct
  misc_feature 1..20: note = Synthetic
  source 1..20: mol_type = other RNA
gtttccaccttggtgtcgaa

SEQ ID NO: 2182 - RNA, 20 nt, synthetic construct
  misc_feature 1..20: note = Synthetic
  source 1..20: mol_type = other RNA
tcgacatttttggtccagtc

SEQ ID NO: 2183 - RNA, 20 nt, synthetic construct
  misc_feature 1..20: note = Synthetic
  source 1..20: mol_type = other RNA
ttgctcctttgactagacgt

SEQ ID NO: 2184 - RNA, 20 nt, synthetic construct
  misc_feature 1..20: note = Synthetic
  source 1..20: mol_type = other RNA
aaaagccaattcctcgacca

SEQ ID NO: 2185 - RNA, 20 nt, synthetic construct
  misc_feature 1..20: note = Synthetic
  source 1..20: mol_type = other RNA
gcaaaacattcggaacgatt

SEQ ID NO: 2186 - RNA, 20 nt, synthetic construct
  misc_feature 1..20: note = Synthetic
  source 1..20: mol_type = other RNA
tatgaattccgatgagccag

SEQ ID NO: 2187 - RNA, 20 nt, synthetic construct
  misc_feature 1..20: note = Synthetic
  source 1..20: mol_type = other RNA
agtttccaccttggtgtcga

SEQ ID NO: 2188 - RNA, 20 nt, synthetic construct
  misc_feature 1..20: note = Synthetic
  source 1..20: mol_type = other RNA
gcctatgcccttcgacacca

SEQ ID NO: 2189 - RNA, 20 nt, synthetic construct
  misc_feature 1..20: note = Synthetic
  source 1..20: mol_type = other RNA
agctcgtgtagccataatca

SEQ ID NO: 2190 - RNA, 20 nt, synthetic construct
  misc_feature 1..20: note = Synthetic
  source 1..20: mol_type = other RNA
tcgtgacccgtggaactggc

SEQ ID NO: 2191 - RNA, 20 nt, synthetic construct
  misc_feature 1..20: note = Synthetic
  source 1..20: mol_type = other RNA
acatttttggtccagtccgg

SEQ ID NO: 2192 - RNA, 20 nt, synthetic construct
  misc_feature 1..20: note = Synthetic
  source 1..20: mol_type = other RNA
actactacttcactgtagga

SEQ ID NO: 2193 - RNA, 20 nt, synthetic construct
  misc_feature 1..20: note = Synthetic
  source 1..20: mol_type = other RNA
ctaggtcaaatatacatcct

SEQ ID NO: 2194 - RNA, 20 nt, synthetic construct
  misc_feature 1..20: note = Synthetic
  source 1..20: mol_type = other RNA
tctggctcatcggaattcat

SEQ ID NO: 2195 - RNA, 20 nt, synthetic construct
  misc_feature 1..20: note = Synthetic
  source 1..20: mol_type = other RNA
ttttccaaatcggattcccc

SEQ ID NO: 2196 - RNA, 20 nt, synthetic construct
  misc_feature 1..20: note = Synthetic
  source 1..20: mol_type = other RNA
gtgacactctcataggacgg

SEQ ID NO: 2197 - RNA, 20 nt, synthetic construct
  misc_feature 1..20: note = Synthetic
  source 1..20: mol_type = other RNA
tagtttcgagggatccaatg

SEQ ID NO: 2198 - RNA, 20 nt, synthetic construct
  misc_feature 1..20: note = Synthetic
  source 1..20: mol_type = other RNA
ttcgaacccttcgcgctctg

SEQ ID NO: 2199 - RNA, 20 nt, synthetic construct
  misc_feature 1..20: note = Synthetic
  source 1..20: mol_type = other RNA
tcatcgctaatccgactgtg

SEQ ID NO: 2200 - RNA, 20 nt, synthetic construct
  misc_feature 1..20: note = Synthetic
  source 1..20: mol_type = other RNA
tgtagtcaccatggcgtatg

SEQ ID NO: 2201 - RNA, 20 nt, synthetic construct
  misc_feature 1..20: note = Synthetic
  source 1..20: mol_type = other RNA
gtgactccggagtaaagcga

SEQ ID NO: 2202 - RNA, 20 nt, synthetic construct
  misc_feature 1..20: note = Synthetic
  source 1..20: mol_type = other RNA
caagacttgctaccgtatcg

SEQ ID NO: 2203 - RNA, 20 nt, synthetic construct
  misc_feature 1..20: note = Synthetic
  source 1..20: mol_type = other RNA
gcacttaccctcaaggacgg

SEQ ID NO: 2204 - RNA, 20 nt, synthetic construct
  misc_feature 1..20: note = Synthetic
  source 1..20: mol_type = other RNA
ctatgtgctgcaccgctcca

SEQ ID NO: 2205 - RNA, 20 nt, synthetic construct
  misc_feature 1..20: note = Synthetic
  source 1..20: mol_type = other RNA
gaatgtcctaggagaatccg

SEQ ID NO: 2206 - RNA, 20 nt, synthetic construct
  misc_feature 1..20: note = Synthetic
  source 1..20: mol_type = other RNA
gcacagcaatagatctccgt

SEQ ID NO: 2207 - RNA, 20 nt, synthetic construct
  misc_feature 1..20: note = Synthetic
  source 1..20: mol_type = other RNA
ggcacagcaatagatctccg

SEQ ID NO: 2208 - RNA, 20 nt, synthetic construct
  misc_feature 1..20: note = Synthetic
  source 1..20: mol_type = other RNA
ggggcaagctcactagtggg

SEQ ID NO: 2209 - RNA, 20 nt, synthetic construct
  misc_feature 1..20: note = Synthetic
  source 1..20: mol_type = other RNA
actagcccggcgttttccag

SEQ ID NO: 2210 - RNA, 20 nt, synthetic construct
  misc_feature 1..20: note = Synthetic
  source 1..20: mol_type = other RNA
aggttaaaggtgatccattg

SEQ ID NO: 2211 - RNA, 20 nt, synthetic construct
  misc_feature 1..20: note = Synthetic
  source 1..20: mol_type = other RNA
gctcccagcagaactgatcg

SEQ ID NO: 2212 - RNA, 20 nt, synthetic construct
  misc_feature 1..20: note = Synthetic
  source 1..20: mol_type = other RNA
aggctggagtgttctcacta

SEQ ID NO: 2213 - RNA, 20 nt, synthetic construct
  misc_feature 1..20: note = Synthetic
  source 1..20: mol_type = other RNA
tgacactctcataggacggt

SEQ ID NO: 2214 - RNA, 20 nt, synthetic construct
  misc_feature 1..20: note = Synthetic
  source 1..20: mol_type = other RNA
gtgcagcacatagctccgat

SEQ ID NO: 2215 - RNA, 20 nt, synthetic construct
  misc_feature 1..20: note = Synthetic
  source 1..20: mol_type = other RNA
ttcttgcttccatcggagag

SEQ ID NO: 2216 - RNA, 20 nt, synthetic construct
  misc_feature 1..20: note = Synthetic
  source 1..20: mol_type = other RNA
agactgatccgagcggccaa

SEQ ID NO: 2217 - RNA, 20 nt, synthetic construct
  misc_feature 1..20: note = Synthetic
  source 1..20: mol_type = other RNA
tgcagctgttgattcccggg

SEQ ID NO: 2218 - RNA, 20 nt, synthetic construct
  misc_feature 1..20: note = Synthetic
  source 1..20: mol_type = other RNA
ggataccaccaagagtccat

SEQ ID NO: 2219 - RNA, 20 nt, synthetic construct
  misc_feature 1..20: note = Synthetic
  source 1..20: mol_type = other RNA
catcgctaatccgactgtgt

SEQ ID NO: 2220 - RNA, 20 nt, synthetic construct
  misc_feature 1..20: note = Synthetic
  source 1..20: mol_type = other RNA
caccatcaccttgtgcatcg

SEQ ID NO: 2221 - RNA, 20 nt, synthetic construct
  misc_feature 1..20: note = Synthetic
  source 1..20: mol_type = other RNA
tctcaacaggcattcgatgc

SEQ ID NO: 2222 - RNA, 20 nt, synthetic construct
  misc_feature 1..20: note = Synthetic
  source 1..20: mol_type = other RNA
ggagaccacgaaagccatcg

SEQ ID NO: 2223 - RNA, 20 nt, synthetic construct
  misc_feature 1..20: note = Synthetic
  source 1..20: mol_type = other RNA
tggttgtaaggatcagagcg

SEQ ID NO: 2224 - RNA, 20 nt, synthetic construct
  misc_feature 1..20: note = Synthetic
  source 1..20: mol_type = other RNA
ggcccgagtggcactaaacc

SEQ ID NO: 2225 - RNA, 20 nt, synthetic construct
  misc_feature 1..20: note = Synthetic
  source 1..20: mol_type = other RNA
tccgttctacagcacacacc

SEQ ID NO: 2226 - RNA, 20 nt, synthetic construct
  misc_feature 1..20: note = Synthetic
  source 1..20: mol_type = other RNA
gtatggagctgattgcccct

SEQ ID NO: 2227 - RNA, 20 nt, synthetic construct
  misc_feature 1..20: note = Synthetic
  source 1..20: mol_type = other RNA
ggcaatcagctccatactgg

SEQ ID NO: 2228 - RNA, 20 nt, synthetic construct
  misc_feature 1..20: note = Synthetic
  source 1..20: mol_type = other RNA
aggtgcatcaactataccga

SEQ ID NO: 2229 - RNA, 20 nt, synthetic construct
  misc_feature 1..20: note = Synthetic
  source 1..20: mol_type = other RNA
cagtggccgcagagcgcgaa

SEQ ID NO: 2230 - RNA, 20 nt, synthetic construct
  misc_feature 1..20: note = Synthetic
  source 1..20: mol_type = other RNA
cagagcgcgaagggttcgaa

SEQ ID NO: 2231 - RNA, 20 nt, synthetic construct
  misc_feature 1..20: note = Synthetic
  source 1..20: mol_type = other RNA
cagcggggccagtcttcatg

SEQ ID NO: 2232 - RNA, 20 nt, synthetic construct
  misc_feature 1..20: note = Synthetic
  source 1..20: mol_type = other RNA
tgttacggtagttttcccct

SEQ ID NO: 2233 - RNA, 20 nt, synthetic construct
  misc_feature 1..20: note = Synthetic
  source 1..20: mol_type = other RNA
ggagcatggcttcgaaggta

SEQ ID NO: 2234 - RNA, 20 nt, synthetic construct
  misc_feature 1..20: note = Synthetic
  source 1..20: mol_type = other RNA
atcataacctccgtccttga

SEQ ID NO: 2235 - RNA, 20 nt, synthetic construct
  misc_feature 1..20: note = Synthetic
  source 1..20: mol_type = other RNA
gcaagctcactagtgggcgg

SEQ ID NO: 2236 - RNA, 20 nt, synthetic construct
  misc_feature 1..20: note = Synthetic
  source 1..20: mol_type = other RNA
gagtgagatatctcggccag

SEQ ID NO: 2237 - RNA, 20 nt, synthetic construct
  misc_feature 1..20: note = Synthetic
  source 1..20: mol_type = other RNA
gctccccgatcagttctgct

SEQ ID NO: 2238 - RNA, 20 nt, synthetic construct
  misc_feature 1..20: note = Synthetic
  source 1..20: mol_type = other RNA
gggagctcaccatagaactt

SEQ ID NO: 2239 - RNA, 20 nt, synthetic construct
  misc_feature 1..20: note = Synthetic
  source 1..20: mol_type = other RNA
caacttccgtcgctttactc

SEQ ID NO: 2240 - RNA, 20 nt, synthetic construct
  misc_feature 1..20: note = Synthetic
  source 1..20: mol_type = other RNA
ggtcaacatgcaacccaagt

SEQ ID NO: 2241 - RNA, 20 nt, synthetic construct
  misc_feature 1..20: note = Synthetic
  source 1..20: mol_type = other RNA
tcacaatcgacaaaggtaca

SEQ ID NO: 2242 - RNA, 20 nt, synthetic construct
  misc_feature 1..20: note = Synthetic
  source 1..20: mol_type = other RNA
cgagatgctgcttaagtggg

SEQ ID NO: 2243 - RNA, 20 nt, synthetic construct
  misc_feature 1..20: note = Synthetic
  source 1..20: mol_type = other RNA
ggttggcaagcagctcctag

SEQ ID NO: 2244 - RNA, 20 nt, synthetic construct
  misc_feature 1..20: note = Synthetic
  source 1..20: mol_type = other RNA
tccggactctacgagcactg

SEQ ID NO: 2245 - RNA, 20 nt, synthetic construct
  misc_feature 1..20: note = Synthetic
  source 1..20: mol_type = other RNA
ggtattccgcatcctctgcg

SEQ ID NO: 2246 - RNA, 20 nt, synthetic construct
  misc_feature 1..20: note = Synthetic
  source 1..20: mol_type = other RNA
ttcaccgctagggtactcgg

SEQ ID NO: 2247 - RNA, 20 nt, synthetic construct
  misc_feature 1..20: note = Synthetic
  source 1..20: mol_type = other RNA
ccaatcatgcctgacgccca

SEQ ID NO: 2248 - RNA, 20 nt, synthetic construct
  misc_feature 1..20: note = Synthetic
  source 1..20: mol_type = other RNA
tttacggcactggcacatgg

SEQ ID NO: 2249 - RNA, 20 nt, synthetic construct
  misc_feature 1..20: note = Synthetic
  source 1..20: mol_type = other RNA
agagccaccgagtaccctag

SEQ ID NO: 2250 - RNA, 20 nt, synthetic construct
  misc_feature 1..20: note = Synthetic
  source 1..20: mol_type = other RNA
ttcggccaatccgagccaag

SEQ ID NO: 2251 - RNA, 20 nt, synthetic construct
  misc_feature 1..20: note = Synthetic
  source 1..20: mol_type = other RNA
acaattctgaagagcgtcgg

SEQ ID NO: 2252 - RNA, 20 nt, synthetic construct
  misc_feature 1..20: note = Synthetic
  source 1..20: mol_type = other RNA
caattctgaagagcgtcgga

SEQ ID NO: 2253 - RNA, 20 nt, synthetic construct
  misc_feature 1..20: note = Synthetic
  source 1..20: mol_type = other RNA
ttaccacttgcagcagagcg

SEQ ID NO: 2254 - RNA, 20 nt, synthetic construct
  misc_feature 1..20: note = Synthetic
  source 1..20: mol_type = other RNA
cagtgctcgtagagtccgga

SEQ ID NO: 2255 - RNA, 20 nt, synthetic construct
  misc_feature 1..20: note = Synthetic
  source 1..20: mol_type = other RNA
agtagagcccagtagtacgc

SEQ ID NO: 2256 - RNA, 20 nt, synthetic construct
  misc_feature 1..20: note = Synthetic
  source 1..20: mol_type = other RNA
gtagagcccagtagtacgca

SEQ ID NO: 2257 - RNA, 20 nt, synthetic construct
  misc_feature 1..20: note = Synthetic
  source 1..20: mol_type = other RNA
gaagagctgctgacctacca

SEQ ID NO: 2258 - RNA, 20 nt, synthetic construct
  misc_feature 1..20: note = Synthetic
  source 1..20: mol_type = other RNA
aacacacggaaggtacgcag

SEQ ID NO: 2259 - RNA, 20 nt, synthetic construct
  misc_feature 1..20: note = Synthetic
  source 1..20: mol_type = other RNA
tgaagatcgcctccactgca

SEQ ID NO: 2260 - RNA, 20 nt, synthetic construct
  misc_feature 1..20: note = Synthetic
  source 1..20: mol_type = other RNA
gcgacatcatcagagcaaag

SEQ ID NO: 2261 - RNA, 20 nt, synthetic construct
  misc_feature 1..20: note = Synthetic
  source 1..20: mol_type = other RNA
gatgcggaataccactagga

SEQ ID NO: 2262 - RNA, 20 nt, synthetic construct
  misc_feature 1..20: note = Synthetic
  source 1..20: mol_type = other RNA
actgcgtgttcatggctaca

SEQ ID NO: 2263 - RNA, 20 nt, synthetic construct
  misc_feature 1..20: note = Synthetic
  source 1..20: mol_type = other RNA
attgtccgcttggctcggat

SEQ ID NO: 2264 - RNA, 20 nt, synthetic construct
  misc_feature 1..20: note = Synthetic
  source 1..20: mol_type = other RNA
tgtttacggcactggcacat

SEQ ID NO: 2265 - RNA, 20 nt, synthetic construct
  misc_feature 1..20: note = Synthetic
  source 1..20: mol_type = other RNA
ttgggtcatcagccggaaca

SEQ ID NO: 2266 - RNA, 20 nt, synthetic construct
  misc_feature 1..20: note = Synthetic
  source 1..20: mol_type = other RNA
cttcttcacagagcgtagca

SEQ ID NO: 2267 - RNA, 20 nt, synthetic construct
  misc_feature 1..20: note = Synthetic
  source 1..20: mol_type = other RNA
gaacacacggaaggtacgca

SEQ ID NO: 2268 - RNA, 20 nt, synthetic construct
  misc_feature 1..20: note = Synthetic
  source 1..20: mol_type = other RNA
ggttcatacaacttcttgag

SEQ ID NO: 2269 - RNA, 20 nt, synthetic construct
  misc_feature 1..20: note = Synthetic
  source 1..20: mol_type = other RNA
cggacaattctgaagagcgt

SEQ ID NO: 2270 - RNA, 20 nt, synthetic construct
  misc_feature 1..20: note = Synthetic
  source 1..20: mol_type = other RNA
gtggtggtcaatgctctcat

SEQ ID NO: 2271 - RNA, 20 nt, synthetic construct
  misc_feature 1..20: note = Synthetic
  source 1..20: mol_type = other RNA
aactgggacagcgcacgaag

SEQ ID NO: 2272 - RNA, 20 nt, synthetic construct
  misc_feature 1..20: note = Synthetic
  source 1..20: mol_type = other RNA
gcctcagtgctcgtagagtc

SEQ ID NO: 2273 - RNA, 20 nt, synthetic construct
  misc_feature 1..20: note = Synthetic
  source 1..20: mol_type = other RNA
aggttccaccaaatgaccca

SEQ ID NO: 2274 - RNA, 20 nt, synthetic construct
  misc_feature 1..20: note = Synthetic
  source 1..20: mol_type = other RNA
ctgctttccatgctgtagcg

SEQ ID NO: 2275 - RNA, 20 nt, synthetic construct
  misc_feature 1..20: note = Synthetic
  source 1..20: mol_type = other RNA
gacttggttggcaccacttg

SEQ ID NO: 2276 - RNA, 20 nt, synthetic construct
  misc_feature 1..20: note = Synthetic
  source 1..20: mol_type = other RNA
tggcatccaagtacctcgtg

SEQ ID NO: 2277 - RNA, 20 nt, synthetic construct
  misc_feature 1..20: note = Synthetic
  source 1..20: mol_type = other RNA
gggggcaacagttccacacg

SEQ ID NO: 2278 - RNA, 20 nt, synthetic construct
  misc_feature 1..20: note = Synthetic
  source 1..20: mol_type = other RNA
ggaatgtcgccatagagctt

SEQ ID NO: 2279 - RNA, 20 nt, synthetic construct
  misc_feature 1..20: note = Synthetic
  source 1..20: mol_type = other RNA
gaagcggattgccatccaaa

SEQ ID NO: 2280 - RNA, 20 nt, synthetic construct
  misc_feature 1..20: note = Synthetic
  source 1..20: mol_type = other RNA
tttggctttgcgacacgcaa

SEQ ID NO: 2281 - RNA, 20 nt, synthetic construct
  misc_feature 1..20: note = Synthetic
  source 1..20: mol_type = other RNA
tttggtagcaggttttccgc

SEQ ID NO: 2282 - RNA, 20 nt, synthetic construct
  misc_feature 1..20: note = Synthetic
  source 1..20: mol_type = other RNA
ctcttgtccacgctacagca

SEQ ID NO: 2283 - RNA, 20 nt, synthetic construct
  misc_feature 1..20: note = Synthetic
  source 1..20: mol_type = other RNA
gaccatacaggatccccgaa

SEQ ID NO: 2284 - RNA, 20 nt, synthetic construct
  misc_feature 1..20: note = Synthetic
  source 1..20: mol_type = other RNA
cctaggaaaattacctttcg

SEQ ID NO: 2285 - RNA, 20 nt, synthetic construct
  misc_feature 1..20: note = Synthetic
  source 1..20: mol_type = other RNA
agcactggatcgattccgcc

SEQ ID NO: 2286 - RNA, 20 nt, synthetic construct
  misc_feature 1..20: note = Synthetic
  source 1..20: mol_type = other RNA
gtttacggcactggcacatg

SEQ ID NO: 2287 - RNA, 20 nt, synthetic construct
  misc_feature 1..20: note = Synthetic
  source 1..20: mol_type = other RNA
gccgtaaacatgagactgtc

SEQ ID NO: 2288 - RNA, 20 nt, synthetic construct
  misc_feature 1..20: note = Synthetic
  source 1..20: mol_type = other RNA
gcctcggcgaaagtagtggt

SEQ ID NO: 2289 - RNA, 20 nt, synthetic construct
  misc_feature 1..20: note = Synthetic
  source 1..20: mol_type = other RNA
tcttaacgcacagccactgg

SEQ ID NO: 2290 - RNA, 20 nt, synthetic construct
  misc_feature 1..20: note = Synthetic
  source 1..20: mol_type = other RNA
tgaacctgaaatgcatctcg

SEQ ID NO: 2291 - RNA, 20 nt, synthetic construct
  misc_feature 1..20: note = Synthetic
  source 1..20: mol_type = other RNA
tcaggtctgaaggtcatcgt

SEQ ID NO: 2292 - RNA, 20 nt, synthetic construct
  misc_feature 1..20: note = Synthetic
  source 1..20: mol_type = other RNA
gtacgacagcgaccagatca

SEQ ID NO: 2293 - RNA, 20 nt, synthetic construct
  misc_feature 1..20: note = Synthetic
  source 1..20: mol_type = other RNA
ttcttctgcaaacagctgag

SEQ ID NO: 2294 - RNA, 20 nt, synthetic construct
  misc_feature 1..20: note = Synthetic
  source 1..20: mol_type = other RNA
atcttctgcagagaatcgcc

SEQ ID NO: 2295 - RNA, 20 nt, synthetic construct
  misc_feature 1..20: note = Synthetic
  source 1..20: mol_type = other RNA
ttaatgggcaaacgggatgc

SEQ ID NO: 2296 - RNA, 20 nt, synthetic construct
  misc_feature 1..20: note = Synthetic
  source 1..20: mol_type = other RNA
accataaagagcctttaaca

SEQ ID NO: 2297 - RNA, 20 nt, synthetic construct
  misc_feature 1..20: note = Synthetic
  source 1..20: mol_type = other RNA
ctttggattaatgggcaaac

SEQ ID NO: 2298 - RNA, 20 nt, synthetic construct
  misc_feature 1..20: note = Synthetic
  source 1..20: mol_type = other RNA
gccctgttaaaggctcttta

SEQ ID NO: 2299 - RNA, 20 nt, synthetic construct
  misc_feature 1..20: note = Synthetic
  source 1..20: mol_type = other RNA
aaaagactgccaaggccacg

SEQ ID NO: 2300 - RNA, 20 nt, synthetic construct
  misc_feature 1..20: note = Synthetic
  source 1..20: mol_type = other RNA
tctctgcagaagatgctcaa

SEQ ID NO: 2301 - RNA, 20 nt, synthetic construct
  misc_feature 1..20: note = Synthetic
  source 1..20: mol_type = other RNA
atctgaattactggtccgac

SEQ ID NO: 2302 - RNA, 20 nt, synthetic construct
  misc_feature 1..20: note = Synthetic
  source 1..20: mol_type = other RNA
tgttttcagtggcttatgaa

SEQ ID NO: 2303 - RNA, 20 nt, synthetic construct
  misc_feature 1..20: note = Synthetic
  source 1..20: mol_type = other RNA
ggccacgaggattttcatgt

SEQ ID NO: 2304 - RNA, 20 nt, synthetic construct
  misc_feature 1..20: note = Synthetic
  source 1..20: mol_type = other RNA
ctggtcgctgtcgtaccagt

SEQ ID NO: 2305 - RNA, 20 nt, synthetic construct
  misc_feature 1..20: note = Synthetic
  source 1..20: mol_type = other RNA
gaaggggcctcaccttgatc

SEQ ID NO: 2306 - RNA, 20 nt, synthetic construct
  misc_feature 1..20: note = Synthetic
  source 1..20: mol_type = other RNA
gggctccggcagttcctcct

SEQ ID NO: 2307 - RNA, 20 nt, synthetic construct
  misc_feature 1..20: note = Synthetic
  source 1..20: mol_type = other RNA
ccaatgatgatctgaattac

SEQ ID NO: 2308 - RNA, 20 nt, synthetic construct
  misc_feature 1..20: note = Synthetic
  source 1..20: mol_type = other RNA
ggccacttgtttttcaattg

SEQ ID NO: 2309 - RNA, 20 nt, synthetic construct
  misc_feature 1..20: note = Synthetic
  source 1..20: mol_type = other RNA
ttaccctattctgctctcgg

SEQ ID NO: 2310 - RNA, 20 nt, synthetic construct
  misc_feature 1..20: note = Synthetic
  source 1..20: mol_type = other RNA
ctgctctcgggggatacttg

SEQ ID NO: 2311 - RNA, 20 nt, synthetic construct
  misc_feature 1..20: note = Synthetic
  source 1..20: mol_type = other RNA
tatcccccgagagcagaata

SEQ ID NO: 2312 - RNA, 20 nt, synthetic construct
  misc_feature 1..20: note = Synthetic
  source 1..20: mol_type = other RNA
gcaatccctccagagatgag

SEQ ID NO: 2313 - RNA, 20 nt, synthetic construct
  misc_feature 1..20: note = Synthetic
  source 1..20: mol_type = other RNA
gtagagatctggatccctct

SEQ ID NO: 2314 - RNA, 20 nt, synthetic construct
  misc_feature 1..20: note = Synthetic
  source 1..20: mol_type = other RNA
tcacatccgtaggagagtct

SEQ ID NO: 2315 - RNA, 20 nt, synthetic construct
  misc_feature 1..20: note = Synthetic
  source 1..20: mol_type = other RNA
cagcctagctcagagctttg

SEQ ID NO: 2316 - RNA, 20 nt, synthetic construct
  misc_feature 1..20: note = Synthetic
  source 1..20: mol_type = other RNA
gtatcccccgagagcagaat

SEQ ID NO: 2317 - RNA, 20 nt, synthetic construct
  misc_feature 1..20: note = Synthetic
  source 1..20: mol_type = other RNA
ctttaccctagactctccta

SEQ ID NO: 2318 - RNA, 20 nt, synthetic construct
  misc_feature 1..20: note = Synthetic
  source 1..20: mol_type = other RNA
ttctcttgattcacatccgt

SEQ ID NO: 2319 - RNA, 20 nt, synthetic construct
  misc_feature 1..20: note = Synthetic
  source 1..20: mol_type = other RNA
aggggagacttaccttgctg

SEQ ID NO: 2320 - RNA, 20 nt, synthetic construct
  misc_feature 1..20: note = Synthetic
  source 1..20: mol_type = other RNA
cttaccctattctgctctcg

SEQ ID NO: 2321 - RNA, 20 nt, synthetic construct
  misc_feature 1..20: note = Synthetic
  source 1..20: mol_type = other RNA
tgagccaggctagcacaggt

SEQ ID NO: 2322 - RNA, 20 nt, synthetic construct
  misc_feature 1..20: note = Synthetic
  source 1..20: mol_type = other RNA
aaaagccactcatctctgga

SEQ ID NO: 2323 - RNA, 20 nt, synthetic construct
  misc_feature 1..20: note = Synthetic
  source 1..20: mol_type = other RNA
gagctttggggctgtctgta

SEQ ID NO: 2324 - RNA, 20 nt, synthetic construct
  misc_feature 1..20: note = Synthetic
  source 1..20: mol_type = other RNA
ttgctctcccaggcaccatg

SEQ ID NO: 2325 - RNA, 20 nt, synthetic construct
  misc_feature 1..20: note = Synthetic
  source 1..20: mol_type = other RNA
agaggagcgtccagccaggt

SEQ ID NO: 2326 - RNA, 20 nt, synthetic construct
  misc_feature 1..20: note = Synthetic
  source 1..20: mol_type = other RNA
tcagcgccggcgactatgag

SEQ ID NO: 2327 - RNA, 20 nt, synthetic construct
  misc_feature 1..20: note = Synthetic
  source 1..20: mol_type = other RNA
ctgggtctggagataccggg

SEQ ID NO: 2328 - RNA, 20 nt, synthetic construct
  misc_feature 1..20: note = Synthetic
  source 1..20: mol_type = other RNA
aatggataacgtcctcccgg

SEQ ID NO: 2329 - RNA, 20 nt, synthetic construct
  misc_feature 1..20: note = Synthetic
  source 1..20: mol_type = other RNA
ttgctcgtggtagcggtcag

SEQ ID NO: 2330 - RNA, 20 nt, synthetic construct
  misc_feature 1..20: note = Synthetic
  source 1..20: mol_type = other RNA
gtggttgagtagtagccctg

SEQ ID NO: 2331 - RNA, 20 nt, synthetic construct
  misc_feature 1..20: note = Synthetic
  source 1..20: mol_type = other RNA
catcagcgccggcgactatg

SEQ ID NO: 2332 - RNA, 20 nt, synthetic construct
  misc_feature 1..20: note = Synthetic
  source 1..20: mol_type = other RNA
tagtcgccggcgctgatgaa

SEQ ID NO: 2333 - RNA, 20 nt, synthetic construct
  misc_feature 1..20: note = Synthetic
  source 1..20: mol_type = other RNA
tggctatgcatacaccgtag

SEQ ID NO: 2334 - RNA, 20 nt, synthetic construct
  misc_feature 1..20: note = Synthetic
  source 1..20: mol_type = other RNA
cacgaactgattgggttccg

SEQ ID NO: 2335 - RNA, 20 nt, synthetic construct
  misc_feature 1..20: note = Synthetic
  source 1..20: mol_type = other RNA
atcagcgccggcgactatga

SEQ ID NO: 2336 - RNA, 20 nt, synthetic construct
  misc_feature 1..20: note = Synthetic
  source 1..20: mol_type = other RNA
tcgctctccaggttccgtct

SEQ ID NO: 2337 - RNA, 20 nt, synthetic construct
  misc_feature 1..20: note = Synthetic
  source 1..20: mol_type = other RNA
ccgtagtgggaatcacacta

SEQ ID NO: 2338 - RNA, 20 nt, synthetic construct
  misc_feature 1..20: note = Synthetic
  source 1..20: mol_type = other RNA
ccatagtgtgattcccacta

SEQ ID NO: 2339 - RNA, 20 nt, synthetic construct
  misc_feature 1..20: note = Synthetic
  source 1..20: mol_type = other RNA
gagtcgtgtgcatgatcgaa

SEQ ID NO: 2340 - RNA, 20 nt, synthetic construct
  misc_feature 1..20: note = Synthetic
  source 1..20: mol_type = other RNA
tggttgagtagtagccctgg

SEQ ID NO: 2341 - RNA, 20 nt, synthetic construct
  misc_feature 1..20: note = Synthetic
  source 1..20: mol_type = other RNA
ggccgtagtaccattcgttg

SEQ ID NO: 2342 - RNA, 20 nt, synthetic construct
  misc_feature 1..20: note = Synthetic
  source 1..20: mol_type = other RNA
ggtgaacctggccttcgcgg

SEQ ID NO: 2343 - RNA, 20 nt, synthetic construct
  misc_feature 1..20: note = Synthetic
  source 1..20: mol_type = other RNA
ccgtgtaggcagctgcccaa

SEQ ID NO: 2344 - RNA, 20 nt, synthetic construct
  misc_feature 1..20: note = Synthetic
  source 1..20: mol_type = other RNA
agaggtctgagtccaccggg

SEQ ID NO: 2345 - RNA, 20 nt, synthetic construct
  misc_feature 1..20: note = Synthetic
  source 1..20: mol_type = other RNA
cttgaagcccagacggaacc

SEQ ID NO: 2346 - RNA, 20 nt, synthetic construct
  misc_feature 1..20: note = Synthetic
  source 1..20: mol_type = other RNA
gcttggcagagacttgctcg

SEQ ID NO: 2347 - RNA, 20 nt, synthetic construct
  misc_feature 1..20: note = Synthetic
  source 1..20: mol_type = other RNA
atcatgcacacgactctgct

SEQ ID NO: 2348 - RNA, 20 nt, synthetic construct
  misc_feature 1..20: note = Synthetic
  source 1..20: mol_type = other RNA
ggtcaccacaatgaccgtgt

SEQ ID NO: 2349 - RNA, 20 nt, synthetic construct
  misc_feature 1..20: note = Synthetic
  source 1..20: mol_type = other RNA
cgtagtgggaatcacactat

SEQ ID NO: 2350 - RNA, 20 nt, synthetic construct
  misc_feature 1..20: note = Synthetic
  source 1..20: mol_type = other RNA
ctggcgaagacagcggcgat

SEQ ID NO: 2351 - RNA, 20 nt, synthetic construct
  misc_feature 1..20: note = Synthetic
  source 1..20: mol_type = other RNA
ggagtccccggggatctcac

SEQ ID NO: 2352 - RNA, 20 nt, synthetic construct
  misc_feature 1..20: note = Synthetic
  source 1..20: mol_type = other RNA
tatctactccatgacggctg

SEQ ID NO: 2353 - RNA, 20 nt, synthetic construct
  misc_feature 1..20: note = Synthetic
  source 1..20: mol_type = other RNA
cctatgctgtccacaacgaa

SEQ ID NO: 2354 - RNA, 20 nt, synthetic construct
  misc_feature 1..20: note = Synthetic
  source 1..20: mol_type = other RNA
agccatggaggcctccgcga

SEQ ID NO: 2355 - RNA, 20 nt, synthetic construct
  misc_feature 1..20: note = Synthetic
  source 1..20: mol_type = other RNA
ttccagcccctcatagtcgc

SEQ ID NO: 2356 - RNA, 20 nt, synthetic construct
  misc_feature 1..20: note = Synthetic
  source 1..20: mol_type = other RNA
tctactgctgcctcaatgac

SEQ ID NO: 2357 - RNA, 20 nt, synthetic construct
  misc_feature 1..20: note = Synthetic
  source 1..20: mol_type = other RNA
ggctatgcatacaccgtagt

SEQ ID NO: 2358 - RNA, 20 nt, synthetic construct
  misc_feature 1..20: note = Synthetic
  source 1..20: mol_type = other RNA
ggctggttgcacgaactgat

SEQ ID NO: 2359 - RNA, 20 nt, synthetic construct
  misc_feature 1..20: note = Synthetic
  source 1..20: mol_type = other RNA
gctggttgcacgaactgatt

SEQ ID NO: 2360 - RNA, 20 nt, synthetic construct
  misc_feature 1..20: note = Synthetic
  source 1..20: mol_type = other RNA
agtcgccggcgctgatgaag

SEQ ID NO: 2361 - RNA, 20 nt, synthetic construct
  misc_feature 1..20: note = Synthetic
  source 1..20: mol_type = other RNA
tgtgtacaaagtcagccgcc

SEQ ID NO: 2362 - RNA, 20 nt, synthetic construct
  misc_feature 1..20: note = Synthetic
  source 1..20: mol_type = other RNA
cgccggcgactatgaggggc

SEQ ID NO: 2363 - RNA, 20 nt, synthetic construct
  misc_feature 1..20: note = Synthetic
  source 1..20: mol_type = other RNA
tgctgccccttcatcagcgc

SEQ ID NO: 2364 - RNA, 20 nt, synthetic construct
  misc_feature 1..20: note = Synthetic
  source 1..20: mol_type = other RNA
ctcgctctccaggttccgtc

SEQ ID NO: 2365 - RNA, 20 nt, synthetic construct
  misc_feature 1..20: note = Synthetic
  source 1..20: mol_type = other RNA
gggatcctcacctgtcattg

SEQ ID NO: 2366 - RNA, 20 nt, synthetic construct
  misc_feature 1..20: note = Synthetic
  source 1..20: mol_type = other RNA
ggtcaaaatgatgattgtcg

SEQ ID NO: 2367 - RNA, 20 nt, synthetic construct
  misc_feature 1..20: note = Synthetic
  source 1..20: mol_type = other RNA
atgtatgatggccatgtacc

SEQ ID NO: 2368 - RNA, 20 nt, synthetic construct
  misc_feature 1..20: note = Synthetic
  source 1..20: mol_type = other RNA
atcaaaggccacagccgtca

SEQ ID NO: 2369 - RNA, 20 nt, synthetic construct
  misc_feature 1..20: note = Synthetic
  source 1..20: mol_type = other RNA
agctgcctacacggtcattg

SEQ ID NO: 2370 - RNA, 20 nt, synthetic construct
  misc_feature 1..20: note = Synthetic
  source 1..20: mol_type = other RNA
tgggcttcaagcatgccttc

SEQ ID NO: 2371 - RNA, 20 nt, synthetic construct
  misc_feature 1..20: note = Synthetic
  source 1..20: mol_type = other RNA
ctgtggttgagtagtagccc

SEQ ID NO: 2372 - RNA, 20 nt, synthetic construct
  misc_feature 1..20: note = Synthetic
  source 1..20: mol_type = other RNA
agccgtcatggagtagatac

SEQ ID NO: 2373 - RNA, 20 nt, synthetic construct
  misc_feature 1..20: note = Synthetic
  source 1..20: mol_type = other RNA
gtccacaacgaatggtacta

SEQ ID NO: 2374 - RNA, 20 nt, synthetic construct
  misc_feature 1..20: note = Synthetic
  source 1..20: mol_type = other RNA
catctacttcctgccgctcg

SEQ ID NO: 2375 - RNA, 20 nt, synthetic construct
  misc_feature 1..20: note = Synthetic
  source 1..20: mol_type = other RNA
gctacaaacatcaccgcgag

SEQ ID NO: 2376 - RNA, 20 nt, synthetic construct
  misc_feature 1..20: note = Synthetic
  source 1..20: mol_type = other RNA
agatgagggcgatcaccacg

SEQ ID NO: 2377 - RNA, 20 nt, synthetic construct
  misc_feature 1..20: note = Synthetic
  source 1..20: mol_type = other RNA
gtgacacctgttgactctcg

SEQ ID NO: 2378 - RNA, 20 nt, synthetic construct
  misc_feature 1..20: note = Synthetic
  source 1..20: mol_type = other RNA
gtgcccggacatcaggcgca

SEQ ID NO: 2379 - RNA, 20 nt, synthetic construct
  misc_feature 1..20: note = Synthetic
  source 1..20: mol_type = other RNA
gggtgccaccaagtgcgtgg

SEQ ID NO: 2380 - RNA, 20 nt, synthetic construct
  misc_feature 1..20: note = Synthetic
  source 1..20: mol_type = other RNA
ccaggccaccacgcacttgg

SEQ ID NO: 2381 - RNA, 20 nt, synthetic construct
  misc_feature 1..20: note = Synthetic
  source 1..20: mol_type = other RNA
ggatcatcctggcccatcgg

SEQ ID NO: 2382 - RNA, 20 nt, synthetic construct
  misc_feature 1..20: note = Synthetic
  source 1..20: mol_type = other RNA
gacgatggcattacccgtca

SEQ ID NO: 2383 - RNA, 20 nt, synthetic construct
  misc_feature 1..20: note = Synthetic
  source 1..20: mol_type = other RNA
ggcgtccccaggatggatca

SEQ ID NO: 2384 - RNA, 20 nt, synthetic construct
  misc_feature 1..20: note = Synthetic
  source 1..20: mol_type = other RNA
cccctccgaggctaccagtg

SEQ ID NO: 2385 - RNA, 20 nt, synthetic construct
  misc_feature 1..20: note = Synthetic
  source 1..20: mol_type = other RNA
tgagggcgatcaccacgagg

SEQ ID NO: 2386 - RNA, 20 nt, synthetic construct
  misc_feature 1..20: note = Synthetic
  source 1..20: mol_type = other RNA
gcctggcccgaagacagcgg

SEQ ID NO: 2387 - RNA, 20 nt, synthetic construct
  misc_feature 1..20: note = Synthetic
  source 1..20: mol_type = other RNA
gactgtgcgcatcctccgat

SEQ ID NO: 2388 - RNA, 20 nt, synthetic construct
  misc_feature 1..20: note = Synthetic
  source 1..20: mol_type = other RNA
agtcaacaggtgtcacacta

SEQ ID NO: 2389 - RNA, 20 nt, synthetic construct
  misc_feature 1..20: note = Synthetic
  source 1..20: mol_type = other RNA
gcaataaccgccttggtgct

SEQ ID NO: 2390 - RNA, 20 nt, synthetic construct
  misc_feature 1..20: note = Synthetic
  source 1..20: mol_type = other RNA
accatagccctgatccatcc

SEQ ID NO: 2391 - RNA, 20 nt, synthetic construct
  misc_feature 1..20: note = Synthetic
  source 1..20: mol_type = other RNA
ccggaatccagagcgaaacc

SEQ ID NO: 2392 - RNA, 20 nt, synthetic construct
  misc_feature 1..20: note = Synthetic
  source 1..20: mol_type = other RNA
cggaatccagagcgaaacct

SEQ ID NO: 2393 - RNA, 20 nt, synthetic construct
  misc_feature 1..20: note = Synthetic
  source 1..20: mol_type = other RNA
gcaccgtgcgcctgatgtcc

SEQ ID NO: 2394 - RNA, 20 nt, synthetic construct
  misc_feature 1..20: note = Synthetic
  source 1..20: mol_type = other RNA
tcatcggcctcacgctctgg

SEQ ID NO: 2395 - RNA, 20 nt, synthetic construct
  misc_feature 1..20: note = Synthetic
  source 1..20: mol_type = other RNA
cgtgaggccgatgacgctgt

SEQ ID NO: 2396 - RNA, 20 nt, synthetic construct
  misc_feature 1..20: note = Synthetic
  source 1..20: mol_type = other RNA
tccaccgtcaccatggacca

SEQ ID NO: 2397 - RNA, 20 nt, synthetic construct
  misc_feature 1..20: note = Synthetic
  source 1..20: mol_type = other RNA
tgaccgccattgctgccgac

SEQ ID NO: 2398 - RNA, 20 nt, synthetic construct
  misc_feature 1..20: note = Synthetic
  source 1..20: mol_type = other RNA
atgcccgtggtgttgctctc

SEQ ID NO: 2399 - RNA, 20 nt, synthetic construct
  misc_feature 1..20: note = Synthetic
  source 1..20: mol_type = other RNA
tcgagcttatcttccttggt

SEQ ID NO: 2400 - RNA, 20 nt, synthetic construct
  misc_feature 1..20: note = Synthetic
  source 1..20: mol_type = other RNA
ggcaccgtgcgcctgatgtc

SEQ ID NO: 2401 - RNA, 20 nt, synthetic construct
  misc_feature 1..20: note = Synthetic
  source 1..20: mol_type = other RNA
ctgcgcgcctccagagcgtg

SEQ ID NO: 2402 - RNA, 20 nt, synthetic construct
  misc_feature 1..20: note = Synthetic
  source 1..20: mol_type = other RNA
ttgcctgtcggcagcaatgg

SEQ ID NO: 2403 - RNA, 20 nt, synthetic construct
  misc_feature 1..20: note = Synthetic
  source 1..20: mol_type = other RNA
tgactgtgcgcatcctccga

SEQ ID NO: 2404 - RNA, 20 nt, synthetic construct
  misc_feature 1..20: note = Synthetic
  source 1..20: mol_type = other RNA
gccccctccgaggctaccag

SEQ ID NO: 2405 - RNA, 20 nt, synthetic construct
  misc_feature 1..20: note = Synthetic
  source 1..20: mol_type = other RNA
cgctcccccaggtttcgctc

SEQ ID NO: 2406 - RNA, 20 nt, synthetic construct
  misc_feature 1..20: note = Synthetic
  source 1..20: mol_type = other RNA
gatgccagcaataaccgcct

SEQ ID NO: 2407 - RNA, 20 nt, synthetic construct
  misc_feature 1..20: note = Synthetic
  source 1..20: mol_type = other RNA
gggcgtccccaggatggatc

SEQ ID NO: 2408 - RNA, 20 nt, synthetic construct
  misc_feature 1..20: note = Synthetic
  source 1..20: mol_type = other RNA
ccccactggtagcctcggag

SEQ ID NO: 2409 - RNA, 20 nt, synthetic construct
  misc_feature 1..20: note = Synthetic
  source 1..20: mol_type = other RNA
acctgttgactctcgtggag

SEQ ID NO: 2410 - RNA, 20 nt, synthetic construct
  misc_feature 1..20: note = Synthetic
  source 1..20: mol_type = other RNA
ccacgcacttggtggcaccc

SEQ ID NO: 2411 - RNA, 20 nt, synthetic construct
  misc_feature 1..20: note = Synthetic
  source 1..20: mol_type = other RNA
accctggtccatggtgacgg

SEQ ID NO: 2412 - RNA, 20 nt, synthetic construct
  misc_feature 1..20: note = Synthetic
  source 1..20: mol_type = other RNA
caactacttcatcgtcaatc

SEQ ID NO: 2413 - RNA, 20 nt, synthetic construct
  misc_feature 1..20: note = Synthetic
  source 1..20: mol_type = other RNA
tgcgcatcctccgatgggcc

SEQ ID NO: 2414 - RNA, 20 nt, synthetic construct
  misc_feature 1..20: note = Synthetic
  source 1..20: mol_type = other RNA
ccccctccgaggctaccagt

SEQ ID NO: 2415 - RNA, 20 nt, synthetic construct
  misc_feature 1..20: note = Synthetic
  source 1..20: mol_type = other RNA
cagctcgagcttatcttcct

SEQ ID NO: 2416 - RNA, 20 nt, synthetic construct
  misc_feature 1..20: note = Synthetic
  source 1..20: mol_type = other RNA
gcgcgcagtgcccggacatc

SEQ ID NO: 2417 - RNA, 20 nt, synthetic construct
  misc_feature 1..20: note = Synthetic
  source 1..20: mol_type = other RNA
tttgtagcctacagcgtcat

SEQ ID NO: 2418 - RNA, 20 nt, synthetic construct
  misc_feature 1..20: note = Synthetic
  source 1..20: mol_type = other RNA
tcccccagaggccttacagg

SEQ ID NO: 2419 - RNA, 20 nt, synthetic construct
  misc_feature 1..20: note = Synthetic
  source 1..20: mol_type = other RNA
gcccccgctgtcttcgggcc

SEQ ID NO: 2420 - RNA, 20 nt, synthetic construct
  misc_feature 1..20: note = Synthetic
  source 1..20: mol_type = other RNA
tccccactggtagcctcgga

SEQ ID NO: 2421 - RNA, 20 nt, synthetic construct
  misc_feature 1..20: note = Synthetic
  source 1..20: mol_type = other RNA
ctccaccgtcaccatggacc

SEQ ID NO: 2422 - RNA, 20 nt, synthetic construct
  misc_feature 1..20: note = Synthetic
  source 1..20: mol_type = other RNA
tctacgcgcttcatagcgag

SEQ ID NO: 2423 - RNA, 20 nt, synthetic construct
  misc_feature 1..20: note = Synthetic
  source 1..20: mol_type = other RNA
cagagcgcgatgcgccagga

SEQ ID NO: 2424 - RNA, 20 nt, synthetic construct
  misc_feature 1..20: note = Synthetic
  source 1..20: mol_type = other RNA
ggggtcaaacacgactgtca

SEQ ID NO: 2425 - RNA, 20 nt, synthetic construct
  misc_feature 1..20: note = Synthetic
  source 1..20: mol_type = other RNA
gcagaaacctggatagacgg

SEQ ID NO: 2426 - RNA, 20 nt, synthetic construct
  misc_feature 1..20: note = Synthetic
  source 1..20: mol_type = other RNA
tatgtacaccgtgaccagaa

SEQ ID NO: 2427 - RNA, 20 nt, synthetic construct
  misc_feature 1..20: note = Synthetic
  source 1..20: mol_type = other RNA
ttgccggtttggatgaaacc

SEQ ID NO: 2428 - RNA, 20 nt, synthetic construct
  misc_feature 1..20: note = Synthetic
  source 1..20: mol_type = other RNA
ctactccatgacggccattg

SEQ ID NO: 2429 - RNA, 20 nt, synthetic construct
  misc_feature 1..20: note = Synthetic
  source 1..20: mol_type = other RNA
ccggtttggatgaaacctgg

SEQ ID NO: 2430 - RNA, 20 nt, synthetic construct
  misc_feature 1..20: note = Synthetic
  source 1..20: mol_type = other RNA
ggacggctgcacgaactggt

SEQ ID NO: 2431 - RNA, 20 nt, synthetic construct
  misc_feature 1..20: note = Synthetic
  source 1..20: mol_type = other RNA
cgccccggcagctagcgagg

SEQ ID NO: 2432 - RNA, 20 nt, synthetic construct
  misc_feature 1..20: note = Synthetic
  source 1..20: mol_type = other RNA
ctgctcatgatacttgtcac

SEQ ID NO: 2433 - RNA, 20 nt, synthetic construct
  misc_feature 1..20: note = Synthetic
  source 1..20: mol_type = other RNA
attgaccaacgtgttgaagg

SEQ ID NO: 2434 - RNA, 20 nt, synthetic construct
  misc_feature 1..20: note = Synthetic
  source 1..20: mol_type = other RNA
gcgctctggtccctggcgta

SEQ ID NO: 2435 - RNA, 20 nt, synthetic construct
  misc_feature 1..20: note = Synthetic
  source 1..20: mol_type = other RNA
acaggcagtcccagcgcgga

SEQ ID NO: 2436 - RNA, 20 nt, synthetic construct
  misc_feature 1..20: note = Synthetic
  source 1..20: mol_type = other RNA
caggcagtcccagcgcggaa

SEQ ID NO: 2437 - RNA, 20 nt, synthetic construct
  misc_feature 1..20: note = Synthetic
  source 1..20: mol_type = other RNA
acaaagcagagagtacggcc

SEQ ID NO: 2438 - RNA, 20 nt, synthetic construct
  misc_feature 1..20: note = Synthetic
  source 1..20: mol_type = other RNA
agtacggcctggcatgactt

SEQ ID NO: 2439 - RNA, 20 nt, synthetic construct
  misc_feature 1..20: note = Synthetic
  source 1..20: mol_type = other RNA
ctggcgaacacagctgtgat

SEQ ID NO: 2440 - RNA, 20 nt, synthetic construct
  misc_feature 1..20: note = Synthetic
  source 1..20: mol_type = other RNA
ttccgcgctgggactgcctg

SEQ ID NO: 2441 - RNA, 20 nt, synthetic construct
  misc_feature 1..20: note = Synthetic
  source 1..20: mol_type = other RNA
tggtggtgtctgcatcgttg

SEQ ID NO: 2442 - RNA, 20 nt, synthetic construct
  misc_feature 1..20: note = Synthetic
  source 1..20: mol_type = other RNA
gagctctagctcatcatagc

SEQ ID NO: 2443 - RNA, 20 nt, synthetic construct
  misc_feature 1..20: note = Synthetic
  source 1..20: mol_type = other RNA
tgacggccattgcggtggac

SEQ ID NO: 2444 - RNA, 20 nt, synthetic construct
  misc_feature 1..20: note = Synthetic
  source 1..20: mol_type = other RNA
ctccatgacggccattgcgg

SEQ ID NO: 2445 - RNA, 20 nt, synthetic construct
  misc_feature 1..20: note = Synthetic
  source 1..20: mol_type = other RNA
tcctcacctgtccaccgcaa

SEQ ID NO: 2446 - RNA, 20 nt, synthetic construct
  misc_feature 1..20: note = Synthetic
  source 1..20: mol_type = other RNA
gcgcatcgcgctctggtccc

SEQ ID NO: 2447 - RNA, 20 nt, synthetic construct
  misc_feature 1..20: note = Synthetic
  source 1..20: mol_type = other RNA
caccaccacaccatacgcca

SEQ ID NO: 2448 - RNA, 20 nt, synthetic construct
  misc_feature 1..20: note = Synthetic
  source 1..20: mol_type = other RNA
accagttcgtgcagccgtcc

SEQ ID NO: 2449 - RNA, 20 nt, synthetic construct
  misc_feature 1..20: note = Synthetic
  source 1..20: mol_type = other RNA
ggaccagagcgcgatgcgcc

SEQ ID NO: 2450 - RNA, 20 nt, synthetic construct
  misc_feature 1..20: note = Synthetic
  source 1..20: mol_type = other RNA
gccaggacggctgcacgaac

SEQ ID NO: 2451 - RNA, 20 nt, synthetic construct
  misc_feature 1..20: note = Synthetic
  source 1..20: mol_type = other RNA
ctgcaactgctggaccaagc

SEQ ID NO: 2452 - RNA, 20 nt, synthetic construct
  misc_feature 1..20: note = Synthetic
  source 1..20: mol_type = other RNA
ccacgggggcagttgagact

SEQ ID NO: 2453 - RNA, 20 nt, synthetic construct
  misc_feature 1..20: note = Synthetic
  source 1..20: mol_type = other RNA
gaaacctggatagacggggg

SEQ ID NO: 2454 - RNA, 20 nt, synthetic construct
  misc_feature 1..20: note = Synthetic
  source 1..20: mol_type = other RNA
caagtatcatgagcagctaa

SEQ ID NO: 2455 - RNA, 20 nt, synthetic construct
  misc_feature 1..20: note = Synthetic
  source 1..20: mol_type = other RNA
gacagtcctcatgcgcttgt

SEQ ID NO: 2456 - RNA, 20 nt, synthetic construct
  misc_feature 1..20: note = Synthetic
  source 1..20: mol_type = other RNA
aggcagtcccagcgcggaag

SEQ ID NO: 2457 - RNA, 20 nt, synthetic construct
  misc_feature 1..20: note = Synthetic
  source 1..20: mol_type = other RNA
ggccgccccggcagctagcg

SEQ ID NO: 2458 - RNA, 20 nt, synthetic construct
  misc_feature 1..20: note = Synthetic
  source 1..20: mol_type = other RNA
ccaacgatgcagacaccacc

SEQ ID NO: 2459 - RNA, 20 nt, synthetic construct
  misc_feature 1..20: note = Synthetic
  source 1..20: mol_type = other RNA
ctggtggtgtctgcatcgtt

SEQ ID NO: 2460 - RNA, 20 nt, synthetic construct
  misc_feature 1..20: note = Synthetic
  source 1..20: mol_type = other RNA
tacatactgctttgccggtt

SEQ ID NO: 2461 - RNA, 20 nt, synthetic construct
  misc_feature 1..20: note = Synthetic
  source 1..20: mol_type = other RNA
gtccaccgcaatggccgtca

SEQ ID NO: 2462 - RNA, 20 nt, synthetic construct
  misc_feature 1..20: note = Synthetic
  source 1..20: mol_type = other RNA
tcctggcccacaagcgcatg

SEQ ID NO: 2463 - RNA, 20 nt, synthetic construct
  misc_feature 1..20: note = Synthetic
  source 1..20: mol_type = other RNA
tgacagtcctcatgcgcttg

SEQ ID NO: 2464 - RNA, 20 nt, synthetic construct
  misc_feature 1..20: note = Synthetic
  source 1..20: mol_type = other RNA
cggtgtacatactgctttgc

SEQ ID NO: 2465 - RNA, 20 nt, synthetic construct
  misc_feature 1..20: note = Synthetic
  source 1..20: mol_type = other RNA
tacttgtcacaggtatctcc

SEQ ID NO: 2466 - RNA, 20 nt, synthetic construct
  misc_feature 1..20: note = Synthetic
  source 1..20: mol_type = other RNA
catggccgccttcaacacgt

SEQ ID NO: 2467 - RNA, 20 nt, synthetic construct
  misc_feature 1..20: note = Synthetic
  source 1..20: mol_type = other RNA
gctgcacgaactggttggtg

SEQ ID NO: 2468 - RNA, 20 nt, synthetic construct
  misc_feature 1..20: note = Synthetic
  source 1..20: mol_type = other RNA
gaccgcctcgctagctgccg

SEQ ID NO: 2469 - RNA, 20 nt, synthetic construct
  misc_feature 1..20: note = Synthetic
  source 1..20: mol_type = other RNA
tgaccgcctcgctagctgcc

SEQ ID NO: 2470 - RNA, 20 nt, synthetic construct
  misc_feature 1..20: note = Synthetic
  source 1..20: mol_type = other RNA
gtagacgaaccggatgtcag

SEQ ID NO: 2471 - RNA, 20 nt, synthetic construct
  misc_feature 1..20: note = Synthetic
  source 1..20: mol_type = other RNA
gaattgcagaaggccgtctg

SEQ ID NO: 2472 - RNA, 20 nt, synthetic construct
  misc_feature 1..20: note = Synthetic
  source 1..20: mol_type = other RNA
gcgcggcctagcaaccacga

SEQ ID NO: 2473 - RNA, 20 nt, synthetic construct
  misc_feature 1..20: note = Synthetic
  source 1..20: mol_type = other RNA
caggtcccacaaccgcagcg

SEQ ID NO: 2474 - RNA, 20 nt, synthetic construct
  misc_feature 1..20: note = Synthetic
  source 1..20: mol_type = other RNA
ggcgcggcctagcaaccacg

SEQ ID NO: 2475 - RNA, 20 nt, synthetic construct
  misc_feature 1..20: note = Synthetic
  source 1..20: mol_type = other RNA
tcatcagggccaagttcgtg

SEQ ID NO: 2476 - RNA, 20 nt, synthetic construct
  misc_feature 1..20: note = Synthetic
  source 1..20: mol_type = other RNA
ggttgctaggccgcgcccca

SEQ ID NO: 2477 - RNA, 20 nt, synthetic construct
  misc_feature 1..20: note = Synthetic
  source 1..20: mol_type = other RNA
ctcataacgctggtataagg

SEQ ID NO: 2478 - RNA, 20 nt, synthetic construct
  misc_feature 1..20: note = Synthetic
  source 1..20: mol_type = other RNA
caatgagaaactcctcgctg

SEQ ID NO: 2479 - RNA, 20 nt, synthetic construct
  misc_feature 1..20: note = Synthetic
  source 1..20: mol_type = other RNA
aattgcagaaggccgtctgt

SEQ ID NO: 2480 - RNA, 20 nt, synthetic construct
  misc_feature 1..20: note = Synthetic
  source 1..20: mol_type = other RNA
tccgcagacactctccatgg

SEQ ID NO: 2481 - RNA, 20 nt, synthetic construct
  misc_feature 1..20: note = Synthetic
  source 1..20: mol_type = other RNA
atcagagcctcgccccctcg

SEQ ID NO: 2482 - RNA, 20 nt, synthetic construct
  misc_feature 1..20: note = Synthetic
  source 1..20: mol_type = other RNA
gatctcataacgctggtata

SEQ ID NO: 2483 - RNA, 20 nt, synthetic construct
  misc_feature 1..20: note = Synthetic
  source 1..20: mol_type = other RNA
cgcggcctagcaaccacgag

SEQ ID NO: 2484 - RNA, 20 nt, synthetic construct
  misc_feature 1..20: note = Synthetic
  source 1..20: mol_type = other RNA
gcggcctagcaaccacgagg

SEQ ID NO: 2485 - RNA, 20 nt, synthetic construct
  misc_feature 1..20: note = Synthetic
  source 1..20: mol_type = other RNA
accgaggtcggaattgcaga

SEQ ID NO: 2486 - RNA, 20 nt, synthetic construct
  misc_feature 1..20: note = Synthetic
  source 1..20: mol_type = other RNA
gtatccgcagacactctcca

SEQ ID NO: 2487 - RNA, 20 nt, synthetic construct
  misc_feature 1..20: note = Synthetic
  source 1..20: mol_type = other RNA
agtcatcagggccaagttcg

SEQ ID NO: 2488 - RNA, 20 nt, synthetic construct
  misc_feature 1..20: note = Synthetic
  source 1..20: mol_type = other RNA
tcatcttgatctcataacgc

SEQ ID NO: 2489 - RNA, 20 nt, synthetic construct
  misc_feature 1..20: note = Synthetic
  source 1..20: mol_type = other RNA
tggcgggggtgtagacgaac

SEQ ID NO: 2490 - RNA, 20 nt, synthetic construct
  misc_feature 1..20: note = Synthetic
  source 1..20: mol_type = other RNA
gggtgaggactcaccgaggt

SEQ ID NO: 2491 - RNA, 20 nt, synthetic construct
  misc_feature 1..20: note = Synthetic
  source 1..20: mol_type = other RNA
taggggatgccgctgacatc

SEQ ID NO: 2492 - RNA, 20 nt, synthetic construct
  misc_feature 1..20: note = Synthetic
  source 1..20: mol_type = other RNA
cgcagacactctccatggcg

SEQ ID NO: 2493 - RNA, 20 nt, synthetic construct
  misc_feature 1..20: note = Synthetic
  source 1..20: mol_type = other RNA
ttcaccaagacctacactgt

SEQ ID NO: 2494 - RNA, 20 nt, synthetic construct
  misc_feature 1..20: note = Synthetic
  source 1..20: mol_type = other RNA
tcaggctatctgggaccgca

SEQ ID NO: 2495 - RNA, 20 nt, synthetic construct
  misc_feature 1..20: note = Synthetic
  source 1..20: mol_type = other RNA
ttctggtgtccccacgaact

SEQ ID NO: 2496 - RNA, 20 nt, synthetic construct
  misc_feature 1..20: note = Synthetic
  source 1..20: mol_type = other RNA
gtcatcagggccaagttcgt

SEQ ID NO: 2497 - RNA, 20 nt, synthetic construct
  misc_feature 1..20: note = Synthetic
  source 1..20: mol_type = other RNA
tggttgctaggccgcgcccc

SEQ ID NO: 2498 - RNA, 20 nt, synthetic construct
  misc_feature 1..20: note = Synthetic
  source 1..20: mol_type = other RNA
gttcgtctacacccccgcca

SEQ ID NO: 2499 - RNA, 20 nt, synthetic construct
  misc_feature 1..20: note = Synthetic
  source 1..20: mol_type = other RNA
gtgtctgcggatacttccac

SEQ ID NO: 2500 - RNA, 20 nt, synthetic construct
  misc_feature 1..20: note = Synthetic
  source 1..20: mol_type = other RNA
ctcgccccctcgtggttgct

SEQ ID NO: 2501 - RNA, 20 nt, synthetic construct
  misc_feature 1..20: note = Synthetic
  source 1..20: mol_type = other RNA
taaagggttccaagccttag

SEQ ID NO: 2502 - RNA, 20 nt, synthetic construct
  misc_feature 1..20: note = Synthetic
  source 1..20: mol_type = other RNA
gcagacactctccatggcgg

SEQ ID NO: 2503 - RNA, 20 nt, synthetic construct
  misc_feature 1..20: note = Synthetic
  source 1..20: mol_type = other RNA
gaaactcctcgctgcggttg

SEQ ID NO: 2504 - RNA, 20 nt, synthetic construct
  misc_feature 1..20: note = Synthetic
  source 1..20: mol_type = other RNA
ctagcaaccacgagggggcg

SEQ ID NO: 2505 - RNA, 20 nt, synthetic construct
  misc_feature 1..20: note = Synthetic
  source 1..20: mol_type = other RNA
ctgagcttagctcagcgccg

SEQ ID NO: 2506 - RNA, 20 nt, synthetic construct
  misc_feature 1..20: note = Synthetic
  source 1..20: mol_type = other RNA
aacgctggtataaggtggtc

SEQ ID NO: 2507 - RNA, 20 nt, synthetic construct
  misc_feature 1..20: note = Synthetic
  source 1..20: mol_type = other RNA
ataaagggttccaagcctta

SEQ ID NO: 2508 - RNA, 20 nt, synthetic construct
  misc_feature 1..20: note = Synthetic
  source 1..20: mol_type = other RNA
aaactcctcgctgcggttgt

SEQ ID NO: 2509 - RNA, 20 nt, synthetic construct
  misc_feature 1..20: note = Synthetic
  source 1..20: mol_type = other RNA
cgggcaggattcaggctatc

SEQ ID NO: 2510 - RNA, 20 nt, synthetic construct
  misc_feature 1..20: note = Synthetic
  source 1..20: mol_type = other RNA
atgatggcaagatgtacacg

SEQ ID NO: 2511 - RNA, 20 nt, synthetic construct
  misc_feature 1..20: note = Synthetic
  source 1..20: mol_type = other RNA
cacgatgagcccgagccaag

SEQ ID NO: 2512 - RNA, 20 nt, synthetic construct
  misc_feature 1..20: note = Synthetic
  source 1..20: mol_type = other RNA
gtgtagaccagcgtgccgaa

SEQ ID NO: 2513 - RNA, 20 nt, synthetic construct
  misc_feature 1..20: note = Synthetic
  source 1..20: mol_type = other RNA
ggtgtagaccagcgtgccga

SEQ ID NO: 2514 - RNA, 20 nt, synthetic construct
  misc_feature 1..20: note = Synthetic
  source 1..20: mol_type = other RNA
gactctcggaagcttccgta

SEQ ID NO: 2515 - RNA, 20 nt, synthetic construct
  misc_feature 1..20: note = Synthetic
  source 1..20: mol_type = other RNA
ttgatgatgcttttatccgg

SEQ ID NO: 2516 - RNA, 20 nt, synthetic construct
  misc_feature 1..20: note = Synthetic
  source 1..20: mol_type = other RNA
gcacgatgagcccgagccaa

SEQ ID NO: 2517 - RNA, 20 nt, synthetic construct
  misc_feature 1..20: note = Synthetic
  source 1..20: mol_type = other RNA
cgtatggatgtactgcacat

SEQ ID NO: 2518 - RNA, 20 nt, synthetic construct
  misc_feature 1..20: note = Synthetic
  source 1..20: mol_type = other RNA
tacgcctgcatccggcagaa

SEQ ID NO: 2519 - RNA, 20 nt, synthetic construct
  misc_feature 1..20: note = Synthetic
  source 1..20: mol_type = other RNA
cagcagcggcaatgacccct

SEQ ID NO: 2520 - RNA, 20 nt, synthetic construct
  misc_feature 1..20: note = Synthetic
  source 1..20: mol_type = other RNA
cctgtaggtcgcgtctatga

SEQ ID NO: 2521 - RNA, 20 nt, synthetic construct
  misc_feature 1..20: note = Synthetic
  source 1..20: mol_type = other RNA
ccggatgcaggcgtagtgtt

SEQ ID NO: 2522 - RNA, 20 nt, synthetic construct
  misc_feature 1..20: note = Synthetic
  source 1..20: mol_type = other RNA
gatgatgcttttatccgggg

SEQ ID NO: 2523 - RNA, 20 nt, synthetic construct
  misc_feature 1..20: note = Synthetic
  source 1..20: mol_type = other RNA
tgatgatgcttttatccggg

SEQ ID NO: 2524 - RNA, 20 nt, synthetic construct
  misc_feature 1..20: note = Synthetic
  source 1..20: mol_type = other RNA
attgatgatgcttttatccg

SEQ ID NO: 2525 - RNA, 20 nt, synthetic construct
  misc_feature 1..20: note = Synthetic
  source 1..20: mol_type = other RNA
ccaggagcgcttaccgatgt

SEQ ID NO: 2526 - RNA, 20 nt, synthetic construct
  misc_feature 1..20: note = Synthetic
  source 1..20: mol_type = other RNA
ttttgcccacagatgtaccg

SEQ ID NO: 2527 - RNA, 20 nt, synthetic construct
  misc_feature 1..20: note = Synthetic
  source 1..20: mol_type = other RNA
cacggggctgtgcaacttcg

SEQ ID NO: 2528 - RNA, 20 nt, synthetic construct
  misc_feature 1..20: note = Synthetic
  source 1..20: mol_type = other RNA
tgcaggcgtagtgtttggac

SEQ ID NO: 2529 - RNA, 20 nt, synthetic construct
  misc_feature 1..20: note = Synthetic
  source 1..20: mol_type = other RNA
ctacgcctgcatccggcaga

SEQ ID NO: 2530 - RNA, 20 nt, synthetic construct
  misc_feature 1..20: note = Synthetic
  source 1..20: mol_type = other RNA
cggcaatgaccccttggctc

SEQ ID NO: 2531 - RNA, 20 nt, synthetic construct
  misc_feature 1..20: note = Synthetic
  source 1..20: mol_type = other RNA
gggcgagcatgtgcacgcct

SEQ ID NO: 2532 - RNA, 20 nt, synthetic construct
  misc_feature 1..20: note = Synthetic
  source 1..20: mol_type = other RNA
ccgtatggatgtactgcaca

SEQ ID NO: 2533 - RNA, 20 nt, synthetic construct
  misc_feature 1..20: note = Synthetic
  source 1..20: mol_type = other RNA
atagttcagccccttgcgct

SEQ ID NO: 2534 - RNA, 20 nt, synthetic construct
  misc_feature 1..20: note = Synthetic
  source 1..20: mol_type = other RNA
ttaccttgcagttacaaccc

SEQ ID NO: 2535 - RNA, 20 nt, synthetic construct
  misc_feature 1..20: note = Synthetic
  source 1..20: mol_type = other RNA
gtaccgaggatgggcccccc

SEQ ID NO: 2536 - RNA, 20 nt, synthetic construct
  misc_feature 1..20: note = Synthetic
  source 1..20: mol_type = other RNA
agcacgatgagcccgagcca

SEQ ID NO: 2537 - RNA, 20 nt, synthetic construct
  misc_feature 1..20: note = Synthetic
  source 1..20: mol_type = other RNA
gcggcaatgaccccttggct

SEQ ID NO: 2538 - RNA, 20 nt, synthetic construct
  misc_feature 1..20: note = Synthetic
  source 1..20: mol_type = other RNA
gccttctgcaactccgacat

SEQ ID NO: 2539 - RNA, 20 nt, synthetic construct
  misc_feature 1..20: note = Synthetic
  source 1..20: mol_type = other RNA
gtatggatgtactgcacatg

SEQ ID NO: 2540 - RNA, 20 nt, synthetic construct
  misc_feature 1..20: note = Synthetic
  source 1..20: mol_type = other RNA
ggtccagagacactcgttct

SEQ ID NO: 2541 - RNA, 20 nt, synthetic construct
  misc_feature 1..20: note = Synthetic
  source 1..20: mol_type = other RNA
gccgcccttctgccggatgc

SEQ ID NO: 2542 - RNA, 20 nt, synthetic construct
  misc_feature 1..20: note = Synthetic
  source 1..20: mol_type = other RNA
ggaggggcccttcggcacgc

SEQ ID NO: 2543 - RNA, 20 nt, synthetic construct
  misc_feature 1..20: note = Synthetic
  source 1..20: mol_type = other RNA
ggctgtgcaacttcgtggag

SEQ ID NO: 2544 - RNA, 20 nt, synthetic construct
  misc_feature 1..20: note = Synthetic
  source 1..20: mol_type = other RNA
tgtgcaacttcgtggagagg

SEQ ID NO: 2545 - RNA, 20 nt, synthetic construct
  misc_feature 1..20: note = Synthetic
  source 1..20: mol_type = other RNA
gctgaactatcggtatcacc

SEQ ID NO: 2546 - RNA, 20 nt, synthetic construct
  misc_feature 1..20: note = Synthetic
  source 1..20: mol_type = other RNA
agtgtttggactggtagcca

SEQ ID NO: 2547 - RNA, 20 nt, synthetic construct
  misc_feature 1..20: note = Synthetic
  source 1..20: mol_type = other RNA
actgcagctggtaccgagga

SEQ ID NO: 2548 - RNA, 20 nt, synthetic construct
  misc_feature 1..20: note = Synthetic
  source 1..20: mol_type = other RNA
ctcgggctcatcgtgctcct

SEQ ID NO: 2549 - RNA, 20 nt, synthetic construct
  misc_feature 1..20: note = Synthetic
  source 1..20: mol_type = other RNA
gttggccattacctgtcagc

SEQ ID NO: 2550 - RNA, 20 nt, synthetic construct
  misc_feature 1..20: note = Synthetic
  source 1..20: mol_type = other RNA
tcaccctctcccagcgcaag

SEQ ID NO: 2551 - RNA, 20 nt, synthetic construct
  misc_feature 1..20: note = Synthetic
  source 1..20: mol_type = other RNA
ccaaacactacgcctgcatc

SEQ ID NO: 2552 - RNA, 20 nt, synthetic construct
  misc_feature 1..20: note = Synthetic
  source 1..20: mol_type = other RNA
accgatgtcggagttgcaga

SEQ ID NO: 2553 - RNA, 20 nt, synthetic construct
  misc_feature 1..20: note = Synthetic
  source 1..20: mol_type = other RNA
gatagttcagccccttgcgc

SEQ ID NO: 2554 - RNA, 20 nt, synthetic construct
  misc_feature 1..20: note = Synthetic
  source 1..20: mol_type = other RNA
gtagccagggtaaccgaaat

SEQ ID NO: 2555 - RNA, 20 nt, synthetic construct
  misc_feature 1..20: note = Synthetic
  source 1..20: mol_type = other RNA
tgcagtagccgcccttctgc

SEQ ID NO: 2556 - RNA, 20 nt, synthetic construct
  misc_feature 1..20: note = Synthetic
  source 1..20: mol_type = other RNA
tatccgggggggcccatcct

SEQ ID NO: 2557 - RNA, 20 nt, synthetic construct
  misc_feature 1..20: note = Synthetic
  source 1..20: mol_type = other RNA
ctgcagctggtaccgaggat

SEQ ID NO: 2558 - RNA, 20 nt, synthetic construct
  misc_feature 1..20: note = Synthetic
  source 1..20: mol_type = other RNA
tttgggatcattgccctgtg

SEQ ID NO: 2559 - RNA, 20 nt, synthetic construct
  misc_feature 1..20: note = Synthetic
  source 1..20: mol_type = other RNA
cagcaaaccctcaagctgag

SEQ ID NO: 2560 - RNA, 20 nt, synthetic construct
  misc_feature 1..20: note = Synthetic
  source 1..20: mol_type = other RNA
ggtgtgggtgaggagcacat

SEQ ID NO: 2561 - RNA, 20 nt, synthetic construct
  misc_feature 1..20: note = Synthetic
  source 1..20: mol_type = other RNA
ggctacaggcttgtcactcg

SEQ ID NO: 2562 - RNA, 20 nt, synthetic construct
  misc_feature 1..20: note = Synthetic
  source 1..20: mol_type = other RNA
tctggtaggagacggcgatg

SEQ ID NO: 2563 - RNA, 20 nt, synthetic construct
  misc_feature 1..20: note = Synthetic
  source 1..20: mol_type = other RNA
ggcgctccccaagaagacag

SEQ ID NO: 2564 - RNA, 20 nt, synthetic construct
  misc_feature 1..20: note = Synthetic
  source 1..20: mol_type = other RNA
gcgctccccaagaagacagg

SEQ ID NO: 2565 - RNA, 20 nt, synthetic construct
  misc_feature 1..20: note = Synthetic
  source 1..20: mol_type = other RNA
aagcaccgcctggagccctg

SEQ ID NO: 2566 - RNA, 20 nt, synthetic construct
  misc_feature 1..20: note = Synthetic
  source 1..20: mol_type = other RNA
ttggagtgatcggcccccag

SEQ ID NO: 2567 - RNA, 20 nt, synthetic construct
  misc_feature 1..20: note = Synthetic
  source 1..20: mol_type = other RNA
ccaggagggcattggcccgg

SEQ ID NO: 2568 - RNA, 20 nt, synthetic construct
  misc_feature 1..20: note = Synthetic
  source 1..20: mol_type = other RNA
gtgcagcaggcagaagagcg

SEQ ID NO: 2569 - RNA, 20 nt, synthetic construct
  misc_feature 1..20: note = Synthetic
  source 1..20: mol_type = other RNA
ccagagggctgattagagag

SEQ ID NO: 2570 - RNA, 20 nt, synthetic construct
  misc_feature 1..20: note = Synthetic
  source 1..20: mol_type = other RNA
gtgggtgaggagcacatggg

SEQ ID NO: 2571 - RNA, 20 nt, synthetic construct
  misc_feature 1..20: note = Synthetic
  source 1..20: mol_type = other RNA
gctgaggaacaagcaccgcc

SEQ ID NO: 2572 - RNA, 20 nt, synthetic construct
  misc_feature 1..20: note = Synthetic
  source 1..20: mol_type = other RNA
tggagtgatcggcccccaga

SEQ ID NO: 2573 - RNA, 20 nt, synthetic construct
  misc_feature 1..20: note = Synthetic
  source 1..20: mol_type = other RNA
tgattagagagaggtccctg

SEQ ID NO: 2574 - RNA, 20 nt, synthetic construct
  misc_feature 1..20: note = Synthetic
  source 1..20: mol_type = other RNA
gctgagagataaccagctgg

SEQ ID NO: 2575 - RNA, 20 nt, synthetic construct
  misc_feature 1..20: note = Synthetic
  source 1..20: mol_type = other RNA
ggtgggaatatacccctcag

SEQ ID NO: 2576 - RNA, 20 nt, synthetic construct
  misc_feature 1..20: note = Synthetic
  source 1..20: mol_type = other RNA
gtggaccgggacaccgtgtg

SEQ ID NO: 2577 - RNA, 20 nt, synthetic construct
  misc_feature 1..20: note = Synthetic
  source 1..20: mol_type = other RNA
ccacggcgtacagcgtcgcg

SEQ ID NO: 2578 - RNA, 20 nt, synthetic construct
  misc_feature 1..20: note = Synthetic
  source 1..20: mol_type = other RNA
taatgtatcgctaccaacgg

SEQ ID NO: 2579 - RNA, 20 nt, synthetic construct
  misc_feature 1..20: note = Synthetic
  source 1..20: mol_type = other RNA
agaggtgcacggtcccattg

SEQ ID NO: 2580 - RNA, 20 nt, synthetic construct
  misc_feature 1..20: note = Synthetic
  source 1..20: mol_type = other RNA
aaagttgggacagtcaccgg

SEQ ID NO: 2581 - RNA, 20 nt, synthetic construct
  misc_feature 1..20: note = Synthetic
  source 1..20: mol_type = other RNA
aggtggcaccaccctatcag

SEQ ID NO: 2582 - RNA, 20 nt, synthetic construct
  misc_feature 1..20: note = Synthetic
  source 1..20: mol_type = other RNA
ggtggcaccaccctatcagg

SEQ ID NO: 2583 - RNA, 20 nt, synthetic construct
  misc_feature 1..20: note = Synthetic
  source 1..20: mol_type = other RNA
tgcgctggaaggaattcgtg

SEQ ID NO: 2584 - RNA, 20 nt, synthetic construct
  misc_feature 1..20: note = Synthetic
  source 1..20: mol_type = other RNA
gaattccttccagcgcaacg

SEQ ID NO: 2585 - RNA, 20 nt, synthetic construct
  misc_feature 1..20: note = Synthetic
  source 1..20: mol_type = other RNA
acagcatgctggcgacctgg

SEQ ID NO: 2586 - RNA, 20 nt, synthetic construct
  misc_feature 1..20: note = Synthetic
  source 1..20: mol_type = other RNA
ttggtgggaatatacccctc

SEQ ID NO: 2587 - RNA, 20 nt, synthetic construct
  misc_feature 1..20: note = Synthetic
  source 1..20: mol_type = other RNA
gaccagtccaataacccctg

SEQ ID NO: 2588 - RNA, 20 nt, synthetic construct
  misc_feature 1..20: note = Synthetic
  source 1..20: mol_type = other RNA
agagcttggacttccaccgt

SEQ ID NO: 2589 - RNA, 20 nt, synthetic construct
  misc_feature 1..20: note = Synthetic
  source 1..20: mol_type = other RNA
ctttgcggctccccgcagag

SEQ ID NO: 2590 - RNA, 20 nt, synthetic construct
  misc_feature 1..20: note = Synthetic
  source 1..20: mol_type = other RNA
aattccttccagcgcaacgg

SEQ ID NO: 2591 - RNA, 20 nt, synthetic construct
  misc_feature 1..20: note = Synthetic
  source 1..20: mol_type = other RNA
tggactggtccctcacctag

SEQ ID NO: 2592 - RNA, 20 nt, synthetic construct
  misc_feature 1..20: note = Synthetic
  source 1..20: mol_type = other RNA
cagctgctccaaatgccgaa

SEQ ID NO: 2593 - RNA, 20 nt, synthetic construct
  misc_feature 1..20: note = Synthetic
  source 1..20: mol_type = other RNA
gtttaatgtatcgctaccaa

SEQ ID NO: 2594 - RNA, 20 nt, synthetic construct
  misc_feature 1..20: note = Synthetic
  source 1..20: mol_type = other RNA
gggtcagccccctgataggg

SEQ ID NO: 2595 - RNA, 20 nt, synthetic construct
  misc_feature 1..20: note = Synthetic
  source 1..20: mol_type = other RNA
cgcgacgctgtacgccgtgg

SEQ ID NO: 2596 - RNA, 20 nt, synthetic construct
  misc_feature 1..20: note = Synthetic
  source 1..20: mol_type = other RNA
tgagcgaccacgagatcgat

SEQ ID NO: 2597 - RNA, 20 nt, synthetic construct
  misc_feature 1..20: note = Synthetic
  source 1..20: mol_type = other RNA
tccagcgtggcctcgcgccg

SEQ ID NO: 2598 - RNA, 20 nt, synthetic construct
  misc_feature 1..20: note = Synthetic
  source 1..20: mol_type = other RNA
gacatcgaggaggcgctttg

SEQ ID NO: 2599 - RNA, 20 nt, synthetic construct
  misc_feature 1..20: note = Synthetic
  source 1..20: mol_type = other RNA
tggtgggaatatacccctca

SEQ ID NO: 2600 - RNA, 20 nt, synthetic construct
  misc_feature 1..20: note = Synthetic
  source 1..20: mol_type = other RNA
tggacagtcattgtacaagt

SEQ ID NO: 2601 - RNA, 20 nt, synthetic construct
  misc_feature 1..20: note = Synthetic
  source 1..20: mol_type = other RNA
aggaactactactaagcccc

SEQ ID NO: 2602 - RNA, 20 nt, synthetic construct
  misc_feature 1..20: note = Synthetic
  source 1..20: mol_type = other RNA
ctgcggggagccgcaaagtt

SEQ ID NO: 2603 - RNA, 20 nt, synthetic construct
  misc_feature 1..20: note = Synthetic
  source 1..20: mol_type = other RNA
cggtgactgtcccaactttg

SEQ ID NO: 2604 - RNA, 20 nt, synthetic construct
  misc_feature 1..20: note = Synthetic
  source 1..20: mol_type = other RNA
cgggggcacgttctccacca

SEQ ID NO: 2605 - RNA, 20 nt, synthetic construct
  misc_feature 1..20: note = Synthetic
  source 1..20: mol_type = other RNA
acgaattccttccagcgcaa

SEQ ID NO: 2606 - RNA, 20 nt, synthetic construct
  misc_feature 1..20: note = Synthetic
  source 1..20: mol_type = other RNA
cgtgcccccgttgcgctgga

SEQ ID NO: 2607 - RNA, 20 nt, synthetic construct
  misc_feature 1..20: note = Synthetic
  source 1..20: mol_type = other RNA
aatacagcatgctggcgacc

SEQ ID NO: 2608 - RNA, 20 nt, synthetic construct
  misc_feature 1..20: note = Synthetic
  source 1..20: mol_type = other RNA
cgagggctgtcgcaaggatg

SEQ ID NO: 2609 - RNA, 20 nt, synthetic construct
  misc_feature 1..20: note = Synthetic
  source 1..20: mol_type = other RNA
gaggtggcaccaccctatca

SEQ ID NO: 2610 - RNA, 20 nt, synthetic construct
  misc_feature 1..20: note = Synthetic
  source 1..20: mol_type = other RNA
aagtccaagctctactccat

SEQ ID NO: 2611 - RNA, 20 nt, synthetic construct
  misc_feature 1..20: note = Synthetic
  source 1..20: mol_type = other RNA
tgcagccacacacggtgtcc

SEQ ID NO: 2612 - RNA, 20 nt, synthetic construct
  misc_feature 1..20: note = Synthetic
  source 1..20: mol_type = other RNA
accagtccaataacccctga

SEQ ID NO: 2613 - RNA, 20 nt, synthetic construct
  misc_feature 1..20: note = Synthetic
  source 1..20: mol_type = other RNA
cgaggcgcaatacagcatgc

SEQ ID NO: 2614 - RNA, 20 nt, synthetic construct
  misc_feature 1..20: note = Synthetic
  source 1..20: mol_type = other RNA
accacggcgtacagcgtcgc

SEQ ID NO: 2615 - RNA, 20 nt, synthetic construct
  misc_feature 1..20: note = Synthetic
  source 1..20: mol_type = other RNA
tacttgtacaatgactgtcc

SEQ ID NO: 2616 - RNA, 20 nt, synthetic construct
  misc_feature 1..20: note = Synthetic
  source 1..20: mol_type = other RNA
caccacggcgtacagcgtcg

SEQ ID NO: 2617 - RNA, 20 nt, synthetic construct
  misc_feature 1..20: note = Synthetic
  source 1..20: mol_type = other RNA
gaacgggcgctgcctgcgcg

SEQ ID NO: 2618 - RNA, 20 nt, synthetic construct
  misc_feature 1..20: note = Synthetic
  source 1..20: mol_type = other RNA
gcgagggctgtcgcaaggat

SEQ ID NO: 2619 - RNA, 20 nt, synthetic construct
  misc_feature 1..20: note = Synthetic
  source 1..20: mol_type = other RNA
agctgctccaaatgccgaaa

SEQ ID NO: 2620 - RNA, 20 nt, synthetic construct
  misc_feature 1..20: note = Synthetic
  source 1..20: mol_type = other RNA
ctcaccaatggagtagagct

SEQ ID NO: 2621 - RNA, 20 nt, synthetic construct
  misc_feature 1..20: note = Synthetic
  source 1..20: mol_type = other RNA
acagtcaccgggggtatagg

SEQ ID NO: 2622 - RNA, 20 nt, synthetic construct
  misc_feature 1..20: note = Synthetic
  source 1..20: mol_type = other RNA
tgcagtccgtatcctgcccc

SEQ ID NO: 2623 - RNA, 20 nt, synthetic construct
  misc_feature 1..20: note = Synthetic
  source 1..20: mol_type = other RNA
cgtgttggagaacgtccccg

SEQ ID NO: 2624 - RNA, 20 nt, synthetic construct
  misc_feature 1..20: note = Synthetic
  source 1..20: mol_type = other RNA
ttgcctgccgataaggcccg

SEQ ID NO: 2625 - RNA, 20 nt, synthetic construct
  misc_feature 1..20: note = Synthetic
  source 1..20: mol_type = other RNA
gtggggcctgcaaatatccg

SEQ ID NO: 2626 - RNA, 20 nt, synthetic construct
  misc_feature 1..20: note = Synthetic
  source 1..20: mol_type = other RNA
gtgctgcagcaaatgctcgc

SEQ ID NO: 2627 - RNA, 20 nt, synthetic construct
  misc_feature 1..20: note = Synthetic
  source 1..20: mol_type = other RNA
cccgggcggcacttgcgcag

SEQ ID NO: 2628 - RNA, 20 nt, synthetic construct
  misc_feature 1..20: note = Synthetic
  source 1..20: mol_type = other RNA
ggggacctgctcgtccttcg

SEQ ID NO: 2629 - RNA, 20 nt, synthetic construct
  misc_feature 1..20: note = Synthetic
  source 1..20: mol_type = other RNA
ctccagtccgacggccagcg

SEQ ID NO: 2630 - RNA, 20 nt, synthetic construct
  misc_feature 1..20: note = Synthetic
  source 1..20: mol_type = other RNA
gtactgcgcgctgagcaagc

SEQ ID NO: 2631 - RNA, 20 nt, synthetic construct
  misc_feature 1..20: note = Synthetic
  source 1..20: mol_type = other RNA
aggaactgaaacatcagacg

SEQ ID NO: 2632 - RNA, 20 nt, synthetic construct
  misc_feature 1..20: note = Synthetic
  source 1..20: mol_type = other RNA
gtaacgtggtggccatccct

SEQ ID NO: 2633 - RNA, 20 nt, synthetic construct
  misc_feature 1..20: note = Synthetic
  source 1..20: mol_type = other RNA
gataaggcccggggtacaca

SEQ ID NO: 2634 - RNA, 20 nt, synthetic construct
  misc_feature 1..20: note = Synthetic
  source 1..20: mol_type = other RNA
gcctgtggctggttccgagt

SEQ ID NO: 2635 - RNA, 20 nt, synthetic construct
  misc_feature 1..20: note = Synthetic
  source 1..20: mol_type = other RNA
tgcctgtggctggttccgag

SEQ ID NO: 2636 - RNA, 20 nt, synthetic construct
  misc_feature 1..20: note = Synthetic
  source 1..20: mol_type = other RNA
ggcatttacaccctacgccc

SEQ ID NO: 2637 - RNA, 20 nt, synthetic construct
  misc_feature 1..20: note = Synthetic
  source 1..20: mol_type = other RNA
tctcgctgctctagaccagg

SEQ ID NO: 2638 - RNA, 20 nt, synthetic construct
  misc_feature 1..20: note = Synthetic
  source 1..20: mol_type = other RNA
gcggttctgttcccgagtgc

SEQ ID NO: 2639 - RNA, 20 nt, synthetic construct
  misc_feature 1..20: note = Synthetic
  source 1..20: mol_type = other RNA
gtcgtgttggagaacgtccc

SEQ ID NO: 2640 - RNA, 20 nt, synthetic construct
  misc_feature 1..20: note = Synthetic
  source 1..20: mol_type = other RNA
ccacccggagtatggcccca

SEQ ID NO: 2641 - RNA, 20 nt, synthetic construct
  misc_feature 1..20: note = Synthetic
  source 1..20: mol_type = other RNA
cacccggagtatggccccag

SEQ ID NO: 2642 - RNA, 20 nt, synthetic construct
  misc_feature 1..20: note = Synthetic
  source 1..20: mol_type = other RNA
cgtccttcggggactccgag

SEQ ID NO: 2643 - RNA, 20 nt, synthetic construct
  misc_feature 1..20: note = Synthetic
  source 1..20: mol_type = other RNA
ggagtcacacacggtgtccg

SEQ ID NO: 2644 - RNA, 20 nt, synthetic construct
  misc_feature 1..20: note = Synthetic
  source 1..20: mol_type = other RNA
gagaacgtccccggggcaca

SEQ ID NO: 2645 - RNA, 20 nt, synthetic construct
  misc_feature 1..20: note = Synthetic
  source 1..20: mol_type = other RNA
tcgtgttggagaacgtcccc

SEQ ID NO: 2646 - RNA, 20 nt, synthetic construct
  misc_feature 1..20: note = Synthetic
  source 1..20: mol_type = other RNA
acttgcctgccgataaggcc

SEQ ID NO: 2647 - RNA, 20 nt, synthetic construct
  misc_feature 1..20: note = Synthetic
  source 1..20: mol_type = other RNA
cagacggcgacgggcgccat

SEQ ID NO: 2648 - RNA, 20 nt, synthetic construct
  misc_feature 1..20: note = Synthetic
  source 1..20: mol_type = other RNA
ctccaacacgacttcatcca

SEQ ID NO: 2649 - RNA, 20 nt, synthetic construct
  misc_feature 1..20: note = Synthetic
  source 1..20: mol_type = other RNA
ctggggccatactccgggtg

SEQ ID NO: 2650 - RNA, 20 nt, synthetic construct
  misc_feature 1..20: note = Synthetic
  source 1..20: mol_type = other RNA
cctggggccatactccgggt

SEQ ID NO: 2651 - RNA, 20 nt, synthetic construct
  misc_feature 1..20: note = Synthetic
  source 1..20: mol_type = other RNA
cacgtcccccacccggagta

SEQ ID NO: 2652 - RNA, 20 nt, synthetic construct
  misc_feature 1..20: note = Synthetic
  source 1..20: mol_type = other RNA
ggggtaagtgtactgcccct

SEQ ID NO: 2653 - RNA, 20 nt, synthetic construct
  misc_feature 1..20: note = Synthetic
  source 1..20: mol_type = other RNA
cccacccggagtatggcccc

SEQ ID NO: 2654 - RNA, 20 nt, synthetic construct
  misc_feature 1..20: note = Synthetic
  source 1..20: mol_type = other RNA
cttgcctgccgataaggccc

SEQ ID NO: 2655 - RNA, 20 nt, synthetic construct
  misc_feature 1..20: note = Synthetic
  source 1..20: mol_type = other RNA
ctcgtccttcggggactccg

SEQ ID NO: 2656 - RNA, 20 nt, synthetic construct
  misc_feature 1..20: note = Synthetic
  source 1..20: mol_type = other RNA
cgtagggtgtaaatgccacc

SEQ ID NO: 2657 - RNA, 20 nt, synthetic construct
  misc_feature 1..20: note = Synthetic
  source 1..20: mol_type = other RNA
ccgctgcgcaagtgccgccc

SEQ ID NO: 2658 - RNA, 20 nt, synthetic construct
  misc_feature 1..20: note = Synthetic
  source 1..20: mol_type = other RNA
aggactcagctactcacatc

SEQ ID NO: 2659 - RNA, 20 nt, synthetic construct
  misc_feature 1..20: note = Synthetic
  source 1..20: mol_type = other RNA
gatggccaccacgttacagc

SEQ ID NO: 2660 - RNA, 20 nt, synthetic construct
  misc_feature 1..20: note = Synthetic
  source 1..20: mol_type = other RNA
tgtaacgtggtggccatccc

SEQ ID NO: 2661 - RNA, 20 nt, synthetic construct
  misc_feature 1..20: note = Synthetic
  source 1..20: mol_type = other RNA
ccctggggccatactccggg

SEQ ID NO: 2662 - RNA, 20 nt, synthetic construct
  misc_feature 1..20: note = Synthetic
  source 1..20: mol_type = other RNA
acttcttgcgacttaccaac

SEQ ID NO: 2663 - RNA, 20 nt, synthetic construct
  misc_feature 1..20: note = Synthetic
  source 1..20: mol_type = other RNA
gccttatcggcaggcaagtg

SEQ ID NO: 2664 - RNA, 20 nt, synthetic construct
  misc_feature 1..20: note = Synthetic
  source 1..20: mol_type = other RNA
gtaccccgggccttatcggc

SEQ ID NO: 2665 - RNA, 20 nt, synthetic construct
  misc_feature 1..20: note = Synthetic
  source 1..20: mol_type = other RNA
cgataaggcccggggtacac

SEQ ID NO: 2666 - RNA, 20 nt, synthetic construct
  misc_feature 1..20: note = Synthetic
  source 1..20: mol_type = other RNA
tggacagaagggcgcccact

SEQ ID NO: 2667 - RNA, 20 nt, synthetic construct
  misc_feature 1..20: note = Synthetic
  source 1..20: mol_type = other RNA
agcccagagctccagtccga

SEQ ID NO: 2668 - RNA, 20 nt, synthetic construct
  misc_feature 1..20: note = Synthetic
  source 1..20: mol_type = other RNA
ctcccgggctccggggcgta

SEQ ID NO: 2669 - RNA, 20 nt, synthetic construct
  misc_feature 1..20: note = Synthetic
  source 1..20: mol_type = other RNA
gctcagcgcgcagtaccagc

SEQ ID NO: 2670 - RNA, 20 nt, synthetic construct
  misc_feature 1..20: note = Synthetic
  source 1..20: mol_type = other RNA
ggcgacttcgctcttccagt

SEQ ID NO: 2671 - RNA, 20 nt, synthetic construct
  misc_feature 1..20: note = Synthetic
  source 1..20: mol_type = other RNA
gtgcacgatctgatgcccgg

SEQ ID NO: 2672 - RNA, 20 nt, synthetic construct
  misc_feature 1..20: note = Synthetic
  source 1..20: mol_type = other RNA
tcagatcgtgcacgtccgcg

SEQ ID NO: 2673 - RNA, 20 nt, synthetic construct
  misc_feature 1..20: note = Synthetic
  source 1..20: mol_type = other RNA
gcacgatctgatgcccggcg

SEQ ID NO: 2674 - RNA, 20 nt, synthetic construct
  misc_feature 1..20: note = Synthetic
  source 1..20: mol_type = other RNA
ggtcggtctccgagtccccg

SEQ ID NO: 2675 - RNA, 20 nt, synthetic construct
  misc_feature 1..20: note = Synthetic
  source 1..20: mol_type = other RNA
catcagatcgtgcacgtccg

SEQ ID NO: 2676 - RNA, 20 nt, synthetic construct
  misc_feature 1..20: note = Synthetic
  source 1..20: mol_type = other RNA
tgttggtaactggctacgca

SEQ ID NO: 2677 - RNA, 20 nt, synthetic construct
  misc_feature 1..20: note = Synthetic
  source 1..20: mol_type = other RNA
gggcaacgaggttacctgtc

SEQ ID NO: 2678 - RNA, 20 nt, synthetic construct
  misc_feature 1..20: note = Synthetic
  source 1..20: mol_type = other RNA
ggggcaacgaggttacctgt

SEQ ID NO: 2679 - RNA, 20 nt, synthetic construct
  misc_feature 1..20: note = Synthetic
  source 1..20: mol_type = other RNA
ggttgcccgggtccggacgg

SEQ ID NO: 2680 - RNA, 20 nt, synthetic construct
  misc_feature 1..20: note = Synthetic
  source 1..20: mol_type = other RNA
acgaggttacctgtcgggag

SEQ ID NO: 2681 - RNA, 20 nt, synthetic construct
  misc_feature 1..20: note = Synthetic
  source 1..20: mol_type = other RNA
acgatctgatgcccggcggg

SEQ ID NO: 2682 - RNA, 20 nt, synthetic construct
  misc_feature 1..20: note = Synthetic
  source 1..20: mol_type = other RNA
gggctccggcggcttgaaga

SEQ ID NO: 2683 - RNA, 20 nt, synthetic construct
  misc_feature 1..20: note = Synthetic
  source 1..20: mol_type = other RNA
gtgttggtaactggctacgc

SEQ ID NO: 2684 - RNA, 20 nt, synthetic construct
  misc_feature 1..20: note = Synthetic
  source 1..20: mol_type = other RNA
ggaagtcatctggggttcga

SEQ ID NO: 2685 - RNA, 20 nt, synthetic construct
  misc_feature 1..20: note = Synthetic
  source 1..20: mol_type = other RNA
atcagatcgtgcacgtccgc

SEQ ID NO: 2686 - RNA, 20 nt, synthetic construct
  misc_feature 1..20: note = Synthetic
  source 1..20: mol_type = other RNA
cggggactcggagaccgacc

SEQ ID NO: 2687 - RNA, 20 nt, synthetic construct
  misc_feature 1..20: note = Synthetic
  source 1..20: mol_type = other RNA
atgaacctttaccaaaacga

SEQ ID NO: 2688 - RNA, 20 nt, synthetic construct
  misc_feature 1..20: note = Synthetic
  source 1..20: mol_type = other RNA
gatgaacctttaccaaaacg

SEQ ID NO: 2689 - RNA, 20 nt, synthetic construct
  misc_feature 1..20: note = Synthetic
  source 1..20: mol_type = other RNA
gccggttgcccgggtccgga

SEQ ID NO: 2690 - RNA, 20 nt, synthetic construct
  misc_feature 1..20: note = Synthetic
  source 1..20: mol_type = other RNA
gccgtccggacccgggcaac

SEQ ID NO: 2691 - RNA, 20 nt, synthetic construct
  misc_feature 1..20: note = Synthetic
  source 1..20: mol_type = other RNA
tgcacgatctgatgcccggc

SEQ ID NO: 2692 - RNA, 20 nt, synthetic construct
  misc_feature 1..20: note = Synthetic
  source 1..20: mol_type = other RNA
gacgtgcacgatctgatgcc

SEQ ID NO: 2693 - RNA, 20 nt, synthetic construct
  misc_feature 1..20: note = Synthetic
  source 1..20: mol_type = other RNA
ggactcggagaccgacctgg

SEQ ID NO: 2694 - RNA, 20 nt, synthetic construct
  misc_feature 1..20: note = Synthetic
  source 1..20: mol_type = other RNA
cgaggttacctgtcgggagt

SEQ ID NO: 2695 - RNA, 20 nt, synthetic construct
  misc_feature 1..20: note = Synthetic
  source 1..20: mol_type = other RNA
acccgggcaaccggcacccg

SEQ ID NO: 2696 - RNA, 20 nt, synthetic construct
  misc_feature 1..20: note = Synthetic
  source 1..20: mol_type = other RNA
gcccaaatcccactcccgac

SEQ ID NO: 2697 - RNA, 20 nt, synthetic construct
  misc_feature 1..20: note = Synthetic
  source 1..20: mol_type = other RNA
cgatcagacaacaacatggc

SEQ ID NO: 2698 - RNA, 20 nt, synthetic construct
  misc_feature 1..20: note = Synthetic
  source 1..20: mol_type = other RNA
agcccacagggaggcgtcat

SEQ ID NO: 2699 - RNA, 20 nt, synthetic construct
  misc_feature 1..20: note = Synthetic
  source 1..20: mol_type = other RNA
gttgaagagcgcctccaggt

SEQ ID NO: 2700 - RNA, 20 nt, synthetic construct
  misc_feature 1..20: note = Synthetic
  source 1..20: mol_type = other RNA
ggggcacgttggccgtcttg

SEQ ID NO: 2701 - RNA, 20 nt, synthetic construct
  misc_feature 1..20: note = Synthetic
  source 1..20: mol_type = other RNA
acatcgatcagacaacaaca

SEQ ID NO: 2702 - RNA, 20 nt, synthetic construct
  misc_feature 1..20: note = Synthetic
  source 1..20: mol_type = other RNA
aacggttctgctgtgagggc

SEQ ID NO: 2703 - RNA, 20 nt, synthetic construct
  misc_feature 1..20: note = Synthetic
  source 1..20: mol_type = other RNA
gttgcccgggtccggacggc

SEQ ID NO: 2704 - RNA, 20 nt, synthetic construct
  misc_feature 1..20: note = Synthetic
  source 1..20: mol_type = other RNA
tggggcacgttggccgtctt

SEQ ID NO: 2705 - RNA, 20 nt, synthetic construct
  misc_feature 1..20: note = Synthetic
  source 1..20: mol_type = other RNA
gggtgccggttgcccgggtc

SEQ ID NO: 2706 - RNA, 20 nt, synthetic construct
  misc_feature 1..20: note = Synthetic
  source 1..20: mol_type = other RNA
cagggcccgccgtccggacc

SEQ ID NO: 2707 - RNA, 20 nt, synthetic construct
  misc_feature 1..20: note = Synthetic
  source 1..20: mol_type = other RNA
agggcccgccgtccggaccc

SEQ ID NO: 2708 - RNA, 20 nt, synthetic construct
  misc_feature 1..20: note = Synthetic
  source 1..20: mol_type = other RNA
cgactccttcttcaagccgc

SEQ ID NO: 2709 - RNA, 20 nt, synthetic construct
  misc_feature 1..20: note = Synthetic
  source 1..20: mol_type = other RNA
taataggccagtactgatgc

SEQ ID NO: 2710 - RNA, 20 nt, synthetic construct
  misc_feature 1..20: note = Synthetic
  source 1..20: mol_type = other RNA
gggggctgtgacgttcatct

SEQ ID NO: 2711 - RNA, 20 nt, synthetic construct
  misc_feature 1..20: note = Synthetic
  source 1..20: mol_type = other RNA
cacgatctgatgcccggcgg

SEQ ID NO: 2712 - RNA, 20 nt, synthetic construct
  misc_feature 1..20: note = Synthetic
  source 1..20: mol_type = other RNA
ccaaggcttgaccctcgttt

SEQ ID NO: 2713 - RNA, 20 nt, synthetic construct
  misc_feature 1..20: note = Synthetic
  source 1..20: mol_type = other RNA
gccgcgggtgccggttgccc

SEQ ID NO: 2714 - RNA, 20 nt, synthetic construct
  misc_feature 1..20: note = Synthetic
  source 1..20: mol_type = other RNA
cgtgcacgtccgcggggact

SEQ ID NO: 2715 - RNA, 20 nt, synthetic construct
  misc_feature 1..20: note = Synthetic
  source 1..20: mol_type = other RNA
aatatgatgaactcggcttc

SEQ ID NO: 2716 - RNA, 20 nt, synthetic construct
  misc_feature 1..20: note = Synthetic
  source 1..20: mol_type = other RNA
cgccgcgggtgccggttgcc

SEQ ID NO: 2717 - RNA, 20 nt, synthetic construct
  misc_feature 1..20: note = Synthetic
  source 1..20: mol_type = other RNA
gctcagatcctttccttaac

SEQ ID NO: 2718 - RNA, 20 nt, synthetic construct
  misc_feature 1..20: note = Synthetic
  source 1..20: mol_type = other RNA
ctggggcacgttggccgtct
